(19) United States
(12) Patent Application Publication
(10) Pub. No.: US 2024/0000938 A1
(43) Pub. Date: Jan. 4, 2024

(54) ADOPTIVE CELL THERAPY FOR TREATMENT OF CANCER ASSOCIATED WITH LOSS OF HETEROZYGOSITY

(71) Applicant: A2 Biotherapeutics, Inc., Agoura Hills, CA (US)

(72) Inventors: Carl Alexander Kamb, Thousand Oaks, CA (US); Agnes Hamburger, Newbury Park, CA (US); Breanna Diandreth, Agoura Hills, CA (US); Han Xu, Agoura Hills, CA (US); Julyun Oh, Agoura Hills, CA (US)

(21) Appl. No.: 18/253,721

(22) PCT Filed: Nov. 23, 2021
(86) PCT No.: PCT/US2021/060607

§ 371 Date: May 19, 2023

Related U.S. Application Data
(60) Provisional application No. 63/117,893, filed on Nov. 24, 2020.
(60) Provisional application No. 63/131,731, filed on Dec. 29, 2020.
(60) Provisional application No. 63/141,372, filed on Jan. 25, 2021.
(60) Provisional application No. 63/166,765, filed on Mar. 26, 2021.
(60) Provisional application No. 63/175,987, filed on Apr. 16, 2021.

(51) Int. Cl. A61K 39/00; C07K 14/705; C07K 14/725; C07K 16/28; C07K 16/32; C07K 16/30; A61K 45/06; A61P 35/00; C12N 15/86; C12N 15/11; C12N 9/22

(52) U.S. Cl. CPC A61K 39/4632; C07K 14/70503; C07K 14/7051; C07K 16/2863; C07K 16/32; C07K 16/3007; C07K 16/2803; A61K 45/06; A61K 39/4611; A61K 39/4612; A61K 39/4613; A61K 39/464482; A61K 39/464468; A61K 39/464404; A61P 35/00; C12N 15/86; C12N 15/111; C12N 9/22; C07K 2319/03; A61K 2239/21; A61K 2239/22; A61K 2239/13; C12N 2310/20; C12N 2740/15043

(57) ABSTRACT

The disclosure relates to immune cells comprising systems of two engineered receptors each having a ligand binding domain, collectively designed to target cells identified by loss of heterozygosity and used to treat a disease or disorder, for example, cancer. The disclosure provides immune cells expressing two engineered receptors, methods of making same, and polynucleotides and vectors encoding same.

### CROSS-REFERENCE TO RELATED APPLICATION

[0001] This application claims the benefit of U.S. Provisional Patent Applications No. 63,117,893, filed Nov. 24, 2020; No. 63/131,731, filed Dec. 29, 2020; No. 63/141,372, filed Jan. 25, 2021; No. 63/175,987, filed Apr. 16, 2021; and U.S. Pat. No. 63,166,765, filed Mar. 26, 2021, each of which is incorporated by reference herein in its entirety.

### INCORPORATION BY REFERENCE OF SEQUENCE LISTING

[0002] The present application is being filed with a Sequence Listing in electronic format. The Sequence Listing is provided as a file entitled A2BI-032_01WO_SeqList_ST25.txt, created on Nov. 22, 2021 and is 4.94 MB in size. The information in electronic format of the Sequence Listing is incorporated by reference in its entirety.

### BACKGROUND

[0003] Cell therapy is a powerful tool for the treatment of various diseases, particularly cancers. In conventional adoptive cell therapies, immune cells are engineered to express specific receptors, for example chimeric antigen receptors (CARs) or T Cell Receptors (TCRs), which direct the activity of the immune cells to cellular targets via interaction of the receptor with a ligand expressed by the target cell. Transplant of donor-derived T cells may be used to treat solid tumors and hematological malignancies. For example, T cells genetically modified to express a chimeric antigen receptor specific to CD19 effectively treat B-cell lymphoma when transplanted into patients. Specificity of transplanted T cells for target cells, such as cancer cells, can be increased by modifying the cells to express not only a first activator receptor specific to a target cell type, but also a second inhibitory receptor that prevents activation of the immune cells by non-target cells that express the ligand for the inhibitory receptor. The presence of an inhibitory receptor can result in unintentional inactivation or activation of the immune cell through autocrine binding/signaling mechanisms, or failure of the inhibitory mechanism by in cis blocking from the endogenous blocker antigen (e.g., the antigen for the inhibitory receptor). Autocrine signaling-mediated inactivation/activation of an immune cell used in cell therapy reduces the therapy's efficacy or raises the risk of unchecked activation. Thus, there remains a need for immune cells that express inhibitory receptors and are not functionally affected through autocrine signaling mechanisms.

[0004] Immune cell products expressing this dual receptor system may be made using cells from a donor other than the patient who will receive the immune cell product. When the transplanted immune cells are not derived from the recipient, the transplant is termed an “allogeneic” transplant. Allogeneic transplant is reviewed in Ruella et al. BioDrugs. 31:473-81 (2017) PMID: 29143249; Kim et al. Biomolecules. 10:263 (2020) PMID: 32050611; and Yang et al. Curr Opin Hematol. 22:509-15 (2015) PMID: 26390167.

[0005] Allogeneic transplant of immune cells can cause complications in the recipient, decreasing the effectiveness of adoptive cell therapy and causing potentially life threatening side effects. For example, transplanted allogeneic T cells can view healthy cells of the recipient as foreign, which leads to a cytotoxic T-cell lymphocyte (CTL) response against the cells of the recipient (Graft versus Host Disease, or GvHD). In addition, the recipient's own immune system may recognize the transplanted allogeneic cells as foreign, and eliminate the transplanted cells (Host versus Graft Disease, or HvGD).

[0006] The disclosure provides compositions and methods to reduce autocrine signaling in, increase the efficacy and safety of, and reduce potential complications of, allogeneic immune cells that have been engineered to express a combination of activator and inhibitor receptors that specifically direct the transplanted allogeneic immune cells to target particular target cells, such as cancer cells.

### SUMMARY

[0007] The disclosure provides an allogeneic immune cell comprising: (a) a first engineered receptor, the first engineered receptor comprising a transmembrane region and an extracellular region, the extracellular region comprising a first ligand binding domain capable of specifically binding a first ligand; and (b) a second engineered receptor, the second engineered receptor comprising a transmembrane region and an extracellular region, the extracellular region comprising a second ligand binding domain capable of specifically binding a second ligand, wherein binding of the first ligand binding domain to the first ligand activates or promotes activation of the immune cell by the first receptor, wherein binding of the second ligand binding domain to the second ligand inhibits activation of the immune cell by the first receptor, and wherein the second ligand is expressed by a host immune cell.

[0008] In some embodiments of the allogeneic immune cells of the disclosure, the allogeneic immune cell expresses one or more endogenous T cell receptors (TCRs). In some embodiments, the allogeneic immune cell has not been modified to reduce or eliminate the expression of an endogenous TRCA, TRB, CD3D, CD3E, CD3G and/or CD3Z gene product.

[0009] In some embodiments, binding of the second ligand binding domain to the second ligand inhibits activation of the immune cell by the endogenous TCR.

[0010] In some embodiments, expression of the second engineered receptor reduces graft versus host disease when a plurality of the allogeneic immune cells are administered to a subject.

[0011] In some embodiments, the allogeneic immune cell comprises a first modification that reduces or eliminates expression or function of a component of the major histocompatibility complex class I (MHC I). In some embodiments, the component of MHC I is human leukocyte antigen A (HLA-A), human leukocyte antigen B (HLA-B), human leukocyte antigen C (HLA-C) or beta-2-microglobulin (B2M). In some embodiments, the first modification comprises a genetic modification of a HLA-A, HLA-B, HLA-C or B2M locus of the allogeneic immune cell genome. In some embodiments, the genetic modification comprises a deletion, insertion, substitution or frameshift mutation in the HLA-A, HLA-B, HLA-C or B2M locus. In some embodiments, the first modification reduces expression of a functional protein encoded by the HLA-A, HLA-B, HLA-C or B2M locus.

[0012] In some embodiments, the first modification comprises using a nucleic acid guided endonuclease, a zinc finger nuclease or a TALEN. In some embodiments, the nucleic acid guided endonuclease is selected from the group consisting of Cas1, Cas1B, Cas2, Cas3, Cas4, Cas5, Cas6, Cas7, Cas8, Cas9, Cas10, Csy1, Csy2, Csy3, Cse1, Cse2, Csc1, Csc2, Csa5, Csn2, Csm2, Csm3, Csm4, Csm5, Csm6, Cmr1, Cmr3, Cmr4, Cmr5, Cmr6, Csb1, Csb2, Csb3, Csx17, Csx14, Csx10, Csx16, CsaX, CasY, Csx3, Csx1, Csx15, Csf1, Csf2, Csf3, and Csf4. In some embodiments, the nucleic acid guided endonuclease is Cas9.

[0013] In some embodiments, the allogeneic immune cell is modified with a nucleic acid guided endonuclease in a complex with a guide nucleic acid (gNA) that specifically targets a sequence of the HLA-A, HLA-B, HLA-C or B2M locus. In some embodiments, the allogeneic immune cell is modified with a nucleic acid guided endonuclease in a complex with at least one guide gNA that specifically targets a sequence within the B2M locus and/or a promoter of the B2M gene. In some embodiments, the at least one gNA comprises a sequence that shares about 80%, about 85%, about 90%, about 95%, about 96%, about 97%, about 98%, or about 99% identity to a sequence selected from the group consisting of SEQ ID NOs: 8357-8470. In some embodiments, the at least one gNA comprises a sequence selected from the group consisting of SEQ ID NOs: 8357-8470. In some embodiments, the at least one gNA specifically targets a coding sequence (CDS) of the B2M gene. In some embodiments, the at least one gNA comprises a sequence that shares about 80%, about 85%, about 90%, about 95%, about 96%, about 97%, about 98%, or about 99% identity to a sequence selected from the group consisting of SEQ ID NOs: 8357-8397. In some embodiments, the gNA comprises a sequence selected from the group consisting of SEQ ID NOs: 8357-8397. In some embodiments, the gNA comprises a sequence selected from the group consisting of SEQ ID NOs: 8357-8365.

[0014] In some embodiments, the allogeneic immune cell is modified with a nucleic acid guided endonuclease in a complex with at least one guide gNA that specifically targets a sequence within the HLA-A locus and/or a promoter of the HLA-A gene. In some embodiments, the at least one gNA is specific to a target sequence that shares about 90%, about 95%, about 96%, about 97%, about 98%, or about 99% identity to a sequence selected from the group consisting of SEQ ID NOs: 390-3276. In some embodiments, the at least one gNA is specific to a target sequence selected from the group consisting of SEQ ID NOs: 390-3276. In some embodiments, the allogeneic immune cell is modified with a nucleic acid guided endonuclease in a complex with at least one gNA that specifically targets a sequence of HLA-A*02 alleles. In some embodiments, the at least one gNA is specific to a target sequence that shares about 90%, about 95%, about 96%, about 97%, about 98%, or about 99% identity to a sequence selected from the group consisting of SEQ ID NOs: 390-1585. In some embodiments, the at least one gNA is specific to a target sequence selected from the group consisting of SEQ ID NOs: 390-1585. In some embodiments, the allogeneic immune cell is modified with a nucleic acid guided endonuclease in a complex with at least one gNA that specifically targets a sequence of HLA-A*02:01 alleles. In some embodiments, the at least one gNA is specific to a sequence that shares about 90%, about 95%, about 96%, about 97%, about 98%, or about 99% identity to target a sequence selected from the group consisting of SEQ ID NOs: 390-1174. In some embodiments, the at least one gNA is specific to a target sequence selected from the group consisting of SEQ ID NOs: 390-1174. In some embodiments, the allogeneic immune cell is modified with a nucleic acid guided endonuclease in a complex with at least one gNA that specifically targets a sequence of HLA-A*02:01:01 alleles. In some embodiments, the at least one gNA is specific to a target sequence that shares about 90%, about 95%, about 96%, about 97%, about 98%, or about 99% identity to a sequence selected from the group consisting of SEQ ID NOs: 390-1166. In some embodiments, the at least one gNA is specific to a target sequence selected from the group consisting of SEQ ID NOs: 390-1166. In some embodiments, the allogeneic immune cell is modified with a nucleic acid guided endonuclease in a complex with at least one gNA that specifically targets a sequence of HLA-A*02:01:01:01 alleles. In some embodiments, the at least one gNA is specific to a target sequence that shares about 90%, about 95%, about 96%, about 97%, about 98%, or about 99% identity to a sequence selected from the group consisting of SEQ ID NOs: 390-1126. In some embodiments, the at least one gNA is specific to a target sequence selected from the group consisting of SEQ ID NOs: 390-1126. In some embodiments, the allogeneic immune cell is modified with a nucleic acid guided endonuclease in a complex with at least one guide nucleic acid (gNA) that specifically targets a coding DNA sequence of HLA-A*02. In some embodiments, the at least gNA is specific to a target sequence that shares about 90%, about 95%, about 96%, about 97%, about 98%, or about 99% identity to a sequence selected from the group consisting of SEQ ID NOs: 390-509. In some embodiments, the at least one gNA is specific to a target sequence selected from the group consisting of SEQ ID NOs: 390-509.

[0015] the immune cell is modified with a nucleic acid guided endonuclease in a complex with at least one gNA that specifically targets a coding DNA sequence that is shared by more than 1000 HLA-A*02 alleles. In some embodiments, the at least one gNA is specific to a target sequence that shares about 90%, about 95%, about 96%, about 97%, about 98%, or about 99% identity to a sequence selected from the group consisting of SEQ ID NOs: 390-455. In some embodiments, the at least one gNA is specific to a target sequence selected from the group consisting of SEQ ID NOs: 390-455. In some embodiments, the at least one gNA is specific to a target sequence selected from the group consisting of SEQ ID NOs: 426, 394, 407-408, 414, 423, 421-422, 429, 433, 435,438, 440, 448, 451, and 454.

[0016] In some embodiments, the first modification comprises expression of an interfering RNA. In some embodiments, the interfering RNA is a small interfering RNA (siRNA), a short hairpin RNA (shRNA) or a microRNA. In some embodiments, the interfering RNA comprises a sequence complementary to a target sequence of HLA-A, HLA-B, HLA-C or B2M. In some embodiments, the target sequence of HLA-A, HLA-B, HLA-C or B2M is between 18 and 27 bp in length.

[0017] In some embodiments, the interfering RNA comprises an shRNA capable of inducing RNAi-mediated degradation of an HLA-A*02:01:01 mRNA.

[0018] In some embodiments, the shRNA comprises (a) a first sequence, having from 5′ end to 3′ end a sequence complementary to the HLA-A*02:01:01:01 mRNA; and (b) a second sequence, having from 5′ end to 3′ end a sequence complementary to the first sequence, wherein the first sequence and the second sequence form the shRNA. In some embodiments, the first sequence is 18, 19, 20, 21, or 22 nucleotides. In some embodiments, the first sequence is complementary to a sequence selected from SEQ ID NOs: 8476-16870. In some embodiments, the first sequence and second sequence are present on a single stranded polynucleotide, wherein the first sequence and second sequence are separated by 4, 5, 6, 7, 8, 9, 10, 11, 12, 13, 14, or 15 nucleotides, wherein the 4, 5, 6, 7, 8, 9, 10, 11, 12, 13, 14, or 15 nucleotides form a loop region in the shRNA. In some embodiments, the loop region comprises a sequence selected from SEQ ID NOs: 16872-16884 and 16895. In some embodiments, the shRNA further comprises a 5′ flank sequence and a 3′ flank sequence, wherein the 5′ flank sequence is joined to the 5′ end of the first sequence, and wherein the 3′ flank sequence is joined to the 3′ end of the second sequence. In some embodiments, the 5′ flank sequence is selected from the group consisting of SEQ ID NO: 16885-16887. In some embodiments, the 3′ flank sequence is selected from the group consisting of SEQ ID NO: 16888, 16889, and 16896.

[0019] In some embodiments, the interfering RNA comprises an shRNA capable of inducing RNAi-mediated degradation of a B2M mRNA. In some embodiments, the shRNA comprises (a) a first sequence, having from 5′ end to 3′ end a sequence complementary to the B2M mRNA; and (b) a second sequence, having from 5′ end to 3′ end a sequence complementary to the first sequence, wherein the first sequence and the second sequence form the shRNA. In some embodiments, the first sequence is complementary to a sequence selected from SEQ ID NOs: 16897-21508, 847-8474, and 8368-8370. In some embodiments, the first sequence is complementary to a sequence selected from the group consisting of SEQ ID NOs: 16897-20484. In some embodiments, the first sequence is complementary to a sequence selected from the group consisting of SEQ ID NOs: 16897-19888. In some embodiments, the first sequence is complementary to a sequence selected from the group consisting of SEQ ID NOs: 16897-17478. In some embodiments, the first sequence is selected from the group consisting of SEQ ID NOs: 16897-17178 or SEQ ID NOs: 16897-17034. In some embodiments, the first sequence and second sequence are present on a single stranded polynucleotide, wherein the first sequence and second sequence are separated by 4, 5, 6, 7, 8, 9, 10, 11, 12, 13, 14, or 15 nucleotides, wherein the 4, 5, 6, 7, 8, 9, 10, 11, 12, 13, 14, or 15 nucleotides form a loop region in the shRNA. In some embodiments, the loop region comprises a sequence selected from SEQ ID NOs: 16872-16884, and 16895. In some embodiments, the shRNA further comprises a 5′ flank sequence and a 3′ flank sequence, wherein the 5′ flank sequence is joined to the 5′ end of the first sequence, and wherein the 3′ flank sequence is joined to the 3′ end of the second sequence. In some embodiments, the 5′ flank sequence is selected from SEQ ID NO: 16885-16887 and 16894. In some embodiments, the 3′ flank sequence is selected from SEQ ID NO: 16888, 16889, and 16896. In some embodiments, the shRNA comprises SEQ ID NOs: 21899-21901.

[0020] In some embodiments, the interfering RNA is operably linked to a promoter.

[0021] In some embodiments, the allogeneic immune cell comprises a second modification that reduces or eliminates expression or function of CD52. In some embodiments, the second modification comprises a deletion, insertion, substitution or frameshift mutation in the CD52 locus of the allogeneic immune cell genome. In some embodiments, the second modification comprises using a nucleic acid guided endonuclease, a zinc finger nuclease or a TALEN. In some embodiments, the second modification comprises expression of an interfering RNA. In some embodiments, the interfering RNA is a small interfering RNA (siRNA), a short hairpin RNA (shRNA) or a microRNA. In some embodiments, the interfering RNA comprises a sequence complementary to a target sequence of CD52.

[0022] In some embodiments, the allogeneic immune cell comprises a third modification that reduces targeting of the allogeneic immune cell by NK cells of a subject. the allogeneic immune cell comprises the third modification comprises overexpression of HLA-E, HLA-G or NKG2A.

[0023] In some embodiments, the second ligand is not expressed in a target cell due to loss of heterozygosity of a gene encoding the second ligand.

[0024] In some embodiments, the first ligand and second ligand are not the same.

[0025] In some embodiments, the first ligand is expressed by target cells. In some embodiments, the first ligand is expressed by target cells and a plurality of non-target cells. In some embodiments, the plurality of non-target cells express both the first and second ligands. In some embodiments, the second ligand is not expressed by the target cells, and is expressed by the plurality of non-target cells. In some embodiments, the target cells are cancer cells and the non-target cells are non-cancerous cells.

[0026] In some embodiments, the first ligand is selected from the group consisting of a cell adhesion molecule, a cell-cell signaling molecule, an extracellular domain, a molecule involved in chemotaxis, a glycoprotein, a G protein-coupled receptor, a transmembrane protein, a receptor for a neurotransmitter and a voltage gated ion channel, or a peptide antigen thereof. In some embodiments, the first ligand is a cancer antigen. In some embodiments, the first ligand is selected from the group of antigens in Table 1. In some embodiments, the first ligand binding domain is isolated or derived from the antigen binding domain of an antibody in Table 1. In some embodiments, the first ligand is selected from the group consisting of transferrin receptor (TFRC), epidermal growth factor receptor (EGFR), CEA cell adhesion molecule 5 (CEA), CD19 molecule (CD19), erb-b2 receptor tyrosine kinase 2 (HER2), and mesothelin (MSLN), or a peptide antigen thereof. In some embodiments, the first ligand is a pan-HLA ligand. In some embodiments, the first ligand comprises HLA-A, HLA-B, HLA-C, HLA-E, HLA-F, of HLA-G.

[0027] In some embodiments, the first engineered receptor is a T cell receptor (TCR) or a chimeric antigen receptor (CAR).

[0028] In some embodiments, the second engineered receptor is a T cell receptor (TCR) or a chimeric antigen receptor (CAR).

[0029] In some embodiments, the first ligand binding domain comprises a single chain Fv antibody fragment (ScFv) or a β chain variable domain (Vβ). In some embodiments, the first ligand binding domain comprises a TCR α chain variable domain and a TCR β chain variable domain. In some embodiments, the first ligand binding domain comprises a variable heavy chain (VH) domain and a variable light chain (VL) domain. In some embodiments, the first ligand is EGFR or a peptide antigen thereof, and the first ligand binding domain comprises a sequence of SEQ ID NO: 99, SEQ ID NO: 101, SEQ ID NO: 103, SEQ ID NO: 105, SEQ ID NO: 107, SEQ ID NO: 109, SEQ ID NO: 111, SEQ ID NO: 113, SEQ ID NO: 115 or SEQ ID NO: 381, or a sequence having at least 90%, at least 95% or at least 99% identity thereto. In some embodiments, the first ligand is MSLN or a peptide antigen thereof, and the first ligand binding domain comprises a sequence of SEQ ID NO: 83, SEQ ID NO: 85, SEQ ID NO: 87 or SEQ ID NO: 89, or a sequence having at least 90%, at least 95% or at least 99% identity thereto. In some embodiments, the first ligand is CEA or a peptide antigen thereof, and the first ligand binding domain comprises SEQ ID NO: 91, SEQ ID NO: 93, SEQ ID NO: 95, SEQ ID NO: 97, SEQ ID NO: 273, SEQ ID NO: 275, or SEQ ID NO: 277, or a sequence having at least 90%, at least 95% or at least 99% identity thereto. In some embodiments, the first ligand is CD19 or a peptide antigen thereof, and the first ligand binding domain comprises SEQ ID NO: 266 or SEQ ID NO: 268, or a sequence having at least 90%, at least 95% or at least 99% identity thereto. In some embodiments, the first ligand comprises a pan-HLA ligand, and the first ligand binding domain comprises a sequence of SEQ ID NO: 163, SEQ ID NO: 165, SEQ ID NO: 167, SEQ ID NO: 169, SEQ ID NO: 171, or SEQ ID NO: 173, or a sequence having at least 90%, at least 95% or at least 99% identity thereto. In some embodiments, the first ligand comprises EGFR or a peptide antigen thereof, and the first ligand binding domain comprises CDRs selected from SEQ ID NOs: 129-162. In some embodiments, the first ligand comprises a CEA ligand, or a peptide antigen thereof, and the first ligand binding domain comprises CDRs selected from SEQ ID NOs: 285-293.

[0030] In some embodiments, the second ligand binding domain comprises an ScFv, a VP domain, or a TCR α chain variable domain and a TCR β chain variable domain. In some embodiments, the second ligand binding domain comprises a variable heavy chain (VH) domain and a variable light chain (VL) domain. In some embodiments, the second ligand comprises an HLA-A*02 allele, and wherein the second ligand binding domain comprises any one of SEQ ID NOs: 50-61 or a sequence having at least 90%, at least 95%, or at least 99% identity thereto. In some embodiments, the second ligand comprises an HLA-A*02 allele, and the second ligand binding domain comprises CDRs selected from SEQ ID NOs: 39-49.

[0031] In some embodiments, the second engineered receptor comprises at least one immunoreceptor tyrosine-based inhibitory motif (ITIM). In some embodiments, the second engineered receptor comprises a LILRB1 intracellular domain or a functional variant thereof. In some embodiments, the LILRB1 intracellular domain comprises a sequence at least 95% identical to SEQ ID NO: 73. In some embodiments, the second engineered receptor comprises a LILRB1 transmembrane domain or a functional variant thereof. In some embodiments, the LILRB1 transmembrane domain or a functional variant thereof comprises a sequence at least 95% identical to SEQ ID NO: 82. In some embodiments, the second engineered receptor comprises a LILRB1 hinge domain or functional fragment or variant thereof. In some embodiments, the LILRB1 hinge domain comprises a sequence at least 95% identical to SEQ ID NO: 81, SEQ ID NO: 74 or SEQ ID NO: 75. In some embodiments, the second engineered receptor comprises a LILRB1 intracellular domain and a LILRB1 transmembrane domain, or a functional variant thereof. In some embodiments, the LILRB1 intracellular domain and LILRB1 transmembrane domain comprises SEQ ID NO: 77 or a sequence at least 95% identical to SEQ ID NO: 77. In some embodiments, the second inhibitory receptor comprises a sequence of SEQ ID NO: 21902 or a sequence having at least 90%, at least 95% or at least 99% identity thereto.

[0032] In some embodiments, the immune cell is selected form the group consisting of T cells, B cells and Natural Killer (NK) cells. In some embodiments, the immune cell is non-natural. In some embodiments, the immune cell is isolated.

[0033] The disclosure provides allogeneic immune cells of the disclosure, for use as a medicament. In some embodiments, the medicament is for the treatment of cancer in a subject.

[0034] The disclosure provides pharmaceutical compositions comprising a plurality of the allogeneic immune cells of the disclosure. In some embodiments, the pharmaceutical compositions comprise a pharmaceutically acceptable carrier, diluent or excipient. In some embodiments, the pharmaceutical compositions comprise a therapeutically effective amount of the allogeneic immune cells.

[0035] The disclosure provides methods of increasing the specificity of an adoptive cell therapy in a subject, comprising administering to the subject a plurality of the allogeneic immune cells of or pharmaceutical composition of the disclosure.

[0036] The disclosure provides methods of treating a subject with cancer with an adoptive cell therapy, comprising administering to the subject a plurality of the allogeneic immune cells of or pharmaceutical composition of the disclosure. In some embodiments, cells of the cancer express the first ligand. In some embodiments, cells of the cancer do not express the second ligand due to loss of heterozygosity. In some embodiments, non-target cells express both the first ligand and the second ligand. In some embodiments, immune cells of the subject express the second ligand. In some embodiments, the methods comprise administering a lymphodepletion agent to the subject. In some embodiments, the lymphodepletion agent specifically targets CD52.

[0037] The disclosure provides methods of making the allogeneic immune cell of the disclosure, comprising (a) providing a plurality of allogeneic immune cells; and (b) contacting the immune cells with a vector comprising sequences encoding: (i) a first engineered receptor comprising a transmembrane region and an extracellular region, the extracellular region comprising a first ligand binding domain capable of specifically binding a first ligand, and (ii) a second engineered receptor comprising a transmembrane region and an extracellular region, the extracellular region comprising a second ligand binding domain capable of specifically binding a second ligand;

[0038] wherein binding of the first ligand binding domain to the first ligand activates or promotes activation of the immune cell, and wherein binding of the second ligand binding domain to a second ligand inhibits activation of the immune cell by the first ligand. In some embodiments, the sequences of the first and second engineered receptors are operably linked to a first promoter. In some embodiments, the vector further comprises a sequence encoding a self-cleaving peptide between the sequence encoding the first engineered receptor and the sequence encoding the second engineered receptor. In some embodiments, the vector further comprises a sequence encoding a B2M or HLA-A shRNA operably linked to a sequence promoter. In some embodiments, the vector further comprises a sequence encoding a guide nucleic acid (gNA) comprising a targeting sequence specific to a B2M or HLA-A*02 target sequence, wherein the sequence encoding the gNA is operably linked to a second promoter. In some embodiments, the vector is a lentiviral vector, and contacting the immune cells with the vector comprises transducing the immune cells. In some embodiments, the methods further comprise transfecting the immune cells with a Cas9 protein or a nucleic acid comprising a sequence encoding a Cas9 protein.

[0039] The disclosure provides kits comprising the allogeneic immune cells or pharmaceutical compositions of the disclosure. In some embodiments, the kits further comprise instructions for use.

[0040] The disclosure provides vectors comprising: (a) a sequence encoding a first engineered receptor, the first engineered receptor comprising a transmembrane region and an extracellular region, the extracellular region comprising a first ligand binding domain capable of specifically binding a first ligand; (b) a self-cleaving polypeptide sequence; and (c) a sequence encoding second engineered receptor, the second engineered receptor comprising a transmembrane region and an extracellular region, the extracellular region comprising a second ligand binding domain capable of specifically binding a second ligand, wherein binding of the first ligand binding domain to the first ligand activates or promotes activation of the immune cell by the first receptor, and wherein binding of the second ligand binding domain to the second ligand inhibits activation of the immune cell by the first receptor.

[0041] The disclosure provides vectors comprising: (a) a first promoter operably linked to (i) a sequence encoding a first engineered receptor, the first engineered receptor comprising a transmembrane region and an extracellular region, the extracellular region comprising a first ligand binding domain capable of specifically binding a first ligand, (ii) a self-cleaving polypeptide sequence, and (iii) a sequence encoding second engineered receptor, the second engineered receptor comprising a transmembrane region and an extracellular region, the extracellular region comprising a second ligand binding domain capable of specifically binding a second ligand; and (b) a second promoter operably linked to a sequence encoding a guide nucleic acid or an short interfering RNA (shRNA) capable of reducing expression of HLA-A or B2M by an immune cell; wherein binding of the first ligand binding domain to the first ligand activates or promotes activation of the immune cell by the first receptor, wherein binding of the second ligand binding domain to the second ligand inhibits activation of the immune cell by the first receptor.

[0042] The disclosure provides an immune cell comprising an inhibitory receptor comprising a ligand binding domain specific to a class I major histocompatibility complex (MHC-I) molecule, or a peptide-MHC complex thereof; wherein the immune cell comprises one or more modifications that reduce autocrine binding/signaling by the receptor. In some embodiments, the immune cell further comprises an activator receptor as described herein. In some embodiments, the one or more modifications comprise an inactivating mutation in an endogenous gene encoding an allele of an endogenous MHC class I polypeptide specifically bound by the inhibitory receptor. In some embodiments, the one or more modifications comprise expression of an interfering RNA, wherein expression and/or function of a human leukocyte antigen (HLA) polypeptide, or an allele thereof, or B2M in said immune cell has been reduced or eliminated by expression of the interfering RNA. In some embodiments, the immune cell is autologous.

### BRIEF DESCRIPTION OF THE DRAWINGS

[0043] A better understanding of the features and advantages of the present invention will be obtained by reference to the following detailed description that sets forth illustrative embodiments, in which the principles of the invention are utilized, and the accompanying drawings of which:

[0044] FIG. 1 is a diagram illustrating hemizygous tumor cells forming a tumor against a background of heterozygous cells that compose normal tissue. The hemizygous tumor cells express only Target A and have lost Target B due to loss of heterozygosity (LOH), while the normal cells express both Target A and Target B. This genetic difference can be exploited to create tumor-selective cytotoxic therapeutics that are blocked by Target B and activated by Target A, thereby selectively killing tumors.

[0045] FIG. 2A is a diagram showing an exemplary architecture of a dual targeted therapeutic based on LOH in tumors. In this example, there is cell-based integration of activator and blocker signals.

[0046] FIG. 2B is a series of diagrams showing various activator and receptor formats and combinations.

[0047] FIG. 3A is a pair of diagrams that show exemplary dual receptor constructs of the disclosure in TCR format. In this example, activator and inhibitor (blocker) ligand binding domains (LBDs) are each fused separately to the CD3 gamma subunit of the TCR.

[0048] FIG. 3B is diagram and a table that show exemplary dual receptor constructs of the disclosure in CAR format. Exemplary ITIM and inhibitor domains of the inhibitor CAR are shown in the table at right.

[0049] FIG. 4A is a plot showing the RNA-Seq expression of the transferrin receptor (TFRC) in human tissues from the GTEx database. Transferrin receptor (TFRC) is a candidate for Target A (the activator). Expression of TFRC at the RNA level is ubiquitous and relatively even. TRFC is an essential gene: Loss-of-function homozygous mutations are embryonic lethal in mice.

[0050] FIG. 4B is a plot showing the RNA-Seq expression profiles of HLA-A and HLA-B.

[0051] FIGS. 5A-5H show that the LIR-1 blocker receptor is modular and mediates large EC50 shifts. FIG. 5A shows schematic of T2-Jurkat experiments to evaluate blocker constructs. FIG. 5B shows the effect of various NY-ESO-1 scFv LBD blocker modules (PD-1, CTLA-4, LIR-1) on EC50 of MAGE-A3 CAR activator (MP1-CAR) when loaded with NY-ESO-1 blocker peptide. Error bars indicate±SD (n=2). FIG. 5C shows the effect of an LIR-1 blocker module with various scFv LBDs (ESO, MP1 LBD 1, MP1 LBD 2, HPV E6 LBD 1, HPV E6 LBD 2, HPV E7) on EC50 of MAGE-A3 CAR activator (MP1-CAR) when loaded with corresponding peptide. Error bars indicate±SD (n=2). FIG. 5D shows the effect of an LIR-1 blocker module with NY-ESO-1 scFv LBD on EC50 of different MAGE-A3 CAR activators (MP1-CAR or MP2-CAR) when loaded with NY-ESO-1 blocker peptide. Error bars indicate±SD (n=2). FIG. shows the effect of an LIR-1 blocker module with NY-ESO-1 scFv LBD on EC50 of different TCR activators (MP1-TCR, MP2-TCR, HPV E6-TCR) when loaded with NY-ESO-1 blocker peptide. Error bars indicate±SD (n=2). Three different TCR activators are blocked by NY-ESO-LIR-1, which has an ESO scFv, LIR-1 hinge, LIR-1 TM and LIR-1 ICD. FIG. 5F shows the effect of an LIR-1 blocker module with NY-ESO-1 Ftcr LBDs on EC50 of MAGE-A3 CAR and TCR activators (MP1-CAR, MP1-TCR). Error bars indicate±SD (n=2). Both a third generation CAR activator or a regular TCR activator can be blocked by NY-ESO-1 Ftcr-LIR-1, which has TCRa ECD, LIR-1 TM, a LIR-1 ICD and a TCRb ECD, LIR-1 TM and LIR-1 ICD. FIG. 5G is a pair of diagrams (top and left) and a pair of plots that show that Jurkat cells transfected with either HPV E7-CAR or HPV E7-CAR & A2-LIR-1 co-cultured with beads displaying various ratios of activator (HPV E7) and blocker (NY-ESO-1) antigen demonstrates blocking in cis but not trans. FIG. 5H shows that the A2-LIR-1 blocker module blocks CD19-CAR activator at various activator to blocker ratios. E:T ratio: effector:target ratio.

[0052] FIGS. 6A-6E show that primary T cells expressing a LIR-1 blocker receptor selectively kill tumor cells with pMHC and non-pMHC proof-of-concept targets. FIG. 6A shows primary T cells transduced with HPV E7-TCR activator and ESO-LIR-1 blocker shifts EC50˜100 fold in primary T cell killing assay. Error bars indicate+/−SD (n=2). FIG. 6B shows that HLA-A*02-LIR-1 blocks NY-ESO-1 CAR activator at various activator:blocker DNA ratios in Jurkat cells. FIG. 6C shows that primary T cells transduced with CD19 CAR activator and HLA-A*02 blocker distinguish “tumor” cells from “normal” cells in in vitro cytotoxicity assay and demonstrate selective killing of “tumor” cells in mixed target cell assay at 3:1 E:T. A2-LIR-1: LIR-1 based receptor with an HLA-A2*02 LBD. FIGS. 6D-6E show that primary T cells transduced with CD19 CAR activator and HLA-A*02 blocker demonstrate reversible blockade (FIG. 6D) and activation (FIG. 6E) after 3 rounds of antigen exposure (AB-A-AB and A-AB-A) in an in vitro cytotoxicity assay at 3:1 E:T. The primary T cell cytotoxicity assay was reproduced with three HLA-A*02-negative donors.

[0053] FIGS. 7A-7E show that modified CAR-T cells (i.e., CAR-T cells expressing both an activator and a blocker receptor) selectively kill tumors in xenograft model. FIG. 7A shows primary T cells transduced with CD19 CAR activator and HLA-A*02 blocker demonstrate ˜20-fold expansion with CD3/28 stimulation over 10 days. FIG. 7B shows a schematic of in vivo study design: HLA-A*02 NSG mice were administered either “tumor cells” (A2-negative Raji cells) or “normal cells” (A2-positive Raji cells) subcutaneously and primary T cells (human, HLA-A*02-negative donor) were injected into the tail vein when Raji xenografts averaged ˜70 mm³. FIGS. 7C-7E show readouts of tumor size by caliper measurement (FIG. 7C), human blood T cell count by flow cytometry (FIG. 7D), and survival (FIG. 7E). Error bars are standard error of the mean (s.e.m.). UTD: untransduced.

[0054] FIG. 8 shows that the peptide-loading shift of activation EC50 is typically less than ˜10×. The effect of blocker peptide loading (50 uM each of NY-ESO-1, MAGE-A3, HPV E6, and HPV E7) on activating MAGE-A3 CAR (MP2 CAR) is shown.

[0055] FIG. 9 shows that the LIR-1 blocker receptor is ligand dependent. The effect of NY-ESO-1-LIR-1 blocker on EC50 of activating MAGE-A3 CAR (MP1-CAR) when loaded with various concentrations of NY-ESO-1 blocker peptide is shown.

[0056] FIG. 10 shows that blocker receptors without an intracellular domain (ICD) or with a mutated, non-functional ICD do not block activation. Effect of a modified LIR-1 blocker modules containing no ICD (blue) or a mutated ICD (purple) with NY-ESO-1 scFv LBD on EC50 of MAGE-A3 CAR activator (MP2-CAR) when loaded with 10 uM of NY-ESO-1 blocker peptide is shown.

[0057] FIG. 11 shows that CD19 activates & A2-LIR-1 blocks Jurkat activation in HLA-A*02+(A2+) Raji cells. Jurkat cells transfected with either CD19 or CD19 & A2-LIR-1 were co-cultured with either WT (A2−) Raji cells or A2+ Raji cells at various cell ratios.

[0058] FIG. 12 is four plots that show the correlation of hCD3+ T cells in mouse blood to tumor growth. Shown are graphs of hCD3+ T cells compared to tumor volume 10 days and 17 days after T cell injection with A2− and A2+ Raji cells. UTD: untransduced.

[0059] FIG. 13 shows that Jurkat cells expressing an EGFR CAR activator and an HLA-A*02 LIR-1 blocker are activated by EGFR+/HLA-A*02− HeLa target cells but not EGFR+/HLA-A*02+ HeLa target cells.

[0060] FIG. 14A shows the expression of HLA-A*02 on HeLa cells transduced with HLA-A*02, and HCT116 cells. HeLa and HCT1116 cells were labeled with the anti-HLA-A2 antibody BB7.2 and FACs sorted. Green: unlabeled HeLa; orange: unlabeled HCT116; blue: wild type HCT116 labeled with BB7.2; red: HeLa cells transduced with HLA-A*02 and labeled with BB7.2.

[0061] FIG. 14B shows expression of EGFR on HeLa cells and HCT116 cells. HeLa and HCT1116 cells were labeled with anti-EGFR antibody and FACs sorted. Green: unlabeled HeLa; orange: unlabeled HCT1116; blue: wild type HCT116 labeled with anti-EGFR; red: HeLa cells transduced with HLA-A*02 and labeled with anti-EGFR.

[0062] FIG. 15A shows EGFR CAR activation of Jurkat cells expressing an EGFR CAR, and HCT116 target cells.

[0063] FIG. 15B shows that EGFR CAR activation of Jurkat cells can be blocked by an HLA-A*02 LIR-1 inhibitory receptor. Co-expression of the EGFR CAR and HLA-A*02 LIR-1 inhibitory receptor by Jurkat cells leads to a shift in the CAR E_{MAX} of approximately 1.8× when Jurkat cells are presented with HCT116 target cells expressing EGFR and HLA-A*02.

[0064] FIG. 16A shows titration of activator antigen in a bead-based assay to determine the optimal ratio of activator to blocker antigen.

[0065] FIG. 16B shows titration of blocker (inhibitory) antigen in the presence of a constant amount of activator antigen in a bead based assay to determine the optimal ratio of activator to blocker antigen.

[0066] FIG. 17 is a diagram (left) and a plot (right) showing that a NY-ESO-1 ScFv LIR-1 based inhibitory receptor can inhibit activation of Jurkat cell activation by a MP1 MAGE-A3 TCR using the solid tumor cell line A375 as target cells.

[0067] FIG. 18 is a diagram (left) and a plot (right) showing that a pMHC HLA-A*02 ScFv LIR-1 based inhibitory receptor can inhibit activation of Jurkat cell activation by a CD19 ScFv CAR using the B cell leukemia line NALM6 as target cells.

[0068] FIG. 19 is a diagram (left) and a plot (right) showing that a pMHC HLA-A*02 ScFv LIR-1 based inhibitory receptor can inhibit activation of Jurkat cells by a NY-ESO-1 ScFv CAR activator in a dose dependent manner.

[0069] FIG. 20 shows that a pan HLA (pan class I) ScFv CAR is blocked by expression of an HAL-A*02 LIR-1 blocker with tunable strength when assayed in Jurkat cells using T2 target cells and a luciferase assay.

[0070] FIG. 21A shows that a pMHC HLA-A*02 ScFv LIR-1 based inhibitory receptor can inhibit activation of Jurkat cells in cis in a cell-free bead based assay.

[0071] FIG. 21B that a pMHC HLA-A*02 ScFv LIR-1 based inhibitory receptor can inhibit activation of Jurkat cells by a MSLN ScFv CAR using the leukemia cell line K562 as target cells.

[0072] FIG. 22 is a diagram (left) and a chart (right) showing that a pMHC HLA-A*02 ScFv LIR-1 based inhibitory receptor can inhibit activation of Jurkat cells, as measured by fold induction of IFNγ, by a MSLN ScFv CAR using a pMHC HLA-A*02 ScFv LIR-1 based inhibitory receptor and HLA-A*02+ HeLa and SiHa cells as target cells.

[0073] FIG. 23 shows that a pMHC HLA-A*02 ScFv LIR-1 based inhibitory receptor inhibits killing by MSLN CAR activators using HLA-A*02+ SiHa cells but not HLA-A*02− SiHa cells.

[0074] FIG. 24 shows that activation of Jurkat cells expressing an EGFR ScFv CAR using a bead based assay can be blocked by a pMHC HLA-A*02 ScFv LIR-1 based inhibitory receptor when the activator and inhibitor antigens are present on beads in cis, but not when the activator and inhibitor antigens are present on the beads in trans.

[0075] FIG. 25A shows that activation of Jurkat cells by an EGFR ScFv CAR can be blocked by a pMHC HLA-A*02 ScFv LIR-1 based inhibitory receptor using SiHa target cells expressing HLA-A*02 (SiHa A02), but not by SiHa cells that do not express HLA-A*02 (SiHa WT).

[0076] FIG. 25B shows that activation of Jurkat cells by an EGFR ScFv CAR can be blocked by a pMHC HLA-A*02 ScFv LIR-1 based inhibitory receptor using HeLa target cells expressing HLA-A*02 (HeLa A02), but not by HeLa cells that do not express HLA-A*02 (HeLa WT).

[0077] FIG. 26 shows that additional ScFvs fused to a LIR-1 inhibitory domain inhibit a constitutive CAR activator in a dose dependent manner. Jurkat-NFAT luciferase reporter cells were transfected with an activating CAR construct that exhibits high tonic signaling and an inhibitory construct recognizing various pMHCs. The effect on activation of NFAT-luciferase was measured by co-culturing transfected Jurkat cells with T2 cells loaded with varying amounts of inhibiting peptide.

[0078] FIG. 27 is a diagram (left) and a plot (right) showing that an inhibitory receptor comprising a MiHA-b surrogate ScFv ligand binding domain (KRAS G12V ScFv-blocker) inhibits Jurkat effector cell activation by an activator TCR targeting a MiHA-a surrogate (KRAS G12D TCR, C-891), using T2 target cells.

[0079] FIG. 28 is a diagram (left) and a plot (right) showing that an inhibitory receptor comprising a MiHA-b surrogate ScFv ligand binding domain fused a LIR-1 hinge, TM and ICD (KRAS G12D ScFv-blocker) inhibits Jurkat effector cell activation by a TCR targeting a MiHA-a surrogate (KRAS G12V TCR, C-913), using T2 target cells.

[0080] FIG. 29 is a diagram (left) and a plot (right) showing that an inhibitory receptor comprising a MiHA-b surrogate Ftcr binding domain fused to a LIR1 TM and ICD (KRAS G12V Ftcr-blocker) inhibits Jurkat effector cell activation by a TCR targeting a MiHA-a surrogate (KRAS G12D TCR), using T2 target cells.

[0081] FIG. 30 is a diagram (left) and a plot (right) showing that an inhibitory receptor comprising a MiHA-b surrogate Ftcr binding domain fused to a LIR-1 TM and ICD (KRAS G12D Ftcr-blocker) inhibits Jurkat effector cell activation by a TCR targeting a MiHA-a surrogate (KRAS G12V TCR), using T2 target cells.

[0082] FIG. 31A is a plot showing inhibition of Jurkat cell activation by a MiHA-a TCR using an inhibitory receptor comprising a MiHA-b ScFv ligand binding domain that binds one mutant KRAS peptide [KRAS G1213] and a LIR-1 hinge, transmembrane domain and intracellular domain (ICD) that binds another mutant KRAS peptide (KRAS G12V). Black: C-891 activator; Blue: C-891 activator, C-1761 inhibitor; Red: C-891 activator, C-2371 and C2369 inhibitor.

[0083] FIG. 31B is a plot showing inhibition of Jurkat cell activation by a MiHA-a TCR using an inhibitory receptor comprising a MiHA-b Ftcr ligand binding domain and a LIR-1 transmembrane domain and intracellular domain (ICD).Black: C-913 activator; Blue: C-913 activator, C-1761 inhibitor; Red: C-913 activator, C2365 and C2367 inhibitor.

[0084] FIG. 32 is a plot showing that mouse MiHA-Y TCRs can activate Jurkat effector cells.

[0085] FIG. 33A is a plot and a table showing that an HA-1 Ftcr can block NY-ESO-1 TCR specifically in the presence of HA-1(H) peptide.

[0086] FIG. 33B is a plot and a table showing that there is essentially no blocking of NY-ESO-1 TCR by the HA-1 Ftcr in the presence of the non-specific, allelic variant HA-1(R) peptide.

[0087] FIG. 34A is a plot and a table showing that an HA-1 Ftcr can block a KRAS TCR specifically in the presence of HA-1(H) blocker peptide.

[0088] FIG. 34B is a plot and at table showing that there is essentially no blocking of a KRAS TCR by the HA-1 Ftcr in the presence of the non-specific, allelic variant HA-1(R) peptide.

[0089] FIG. 35 is a plot comparing peptide loading of HA-1(R), HA-1(H) and NY-ESO-1 peptides in T2 cells by flow cytometry.

[0090] FIG. 36A is a plot and a table showing an activation dose response using a MAGE-A3 MP1 ScFv CAR and a NY-ESO-1 ScFv LIR1 blocker.

[0091] FIG. 36B is a plot and a table showing an inhibition dose response using a MAGE-A3 MP1 ScFv CAR and a NY-ESO-1 ScFv LIR1 blocker.

[0092] FIG. 36C is a plot showing the x-value blocker NY-ESO-1 peptide concentrations from FIG. 36B that were normalized to the constant activator MAGE peptide concentrations used for each curve and plotted on the x-axis. B: NY-ESO-1 LIR1 blocker, A: MAGE-A3 peptide 2 ScFv CAR.

[0093] FIG. 37 is a series of plots and a table that shows that a different degree of blocking is observed when an HLA-A*02 ScFv LIR1 inhibitor is used with different EGFR ScFv CAR activators.

[0094] FIG. 38A is a series of fluorescence activated cell sorting (FACS) plots showing expression of EGFR ScFv CAR activator receptor by T cells following incubation of T cells expressing different EGFR ScFv CAR and an HLA-A*02 ScFv LIR1 inhibitor with HeLa cells expressing EGFR activator alone (Target A), inhibitor target alone (Target B) or activator and inhibitor targets (Target AB).

[0095] FIG. 38B is a plot showing quantification activator receptor expression before exposure to target cells, and after 120 hours co-culture with target cells expressing activator ligand alone (Target A), or target cells expressing both activator and blocker ligands (Target AB).

[0096] FIG. 39A is a plot showing cell surface expression of the activator receptor on T cells expressing an EGFR ScFv CAR (CT-482) activator and HLA-A*02 ScFv LIR1 inhibitor (C1765) following co-culture with to populations of HeLa cells expressing EGFR (Target A), HLA-A*02 (Target B), a combination of EGFR and HLA-A*02 on the same cell (Target AB), a mixed population of HeLa cells expressing Target A and Target AB on different cells, or a mixed population of HeLa cells expressing Target B and Target AB on different cells.

[0097] FIG. 39B is a plot showing cell surface expression of the inhibitor receptor on T cells expressing an EGFR ScFv CAR (CT-482) activator and HLA-A*02 ScFv LIR1 inhibitor (C1765) following co-culture with to populations of HeLa cells expressing EGFR (Target A), HLA-A*02 (Target B), a combination of EGFR and HLA-A*02 on the same cell (Target AB), a mixed population of HeLa cells expressing Target A and Target AB on different cells, or a mixed population of HeLa cells expressing Target B and Target AB on different cells.

[0098] FIG. 40 is a diagram of an experiment to determine if loss of expression of activator receptor by T cells was reversible.

[0099] FIG. 41A is a series of plots showing that activator surface loss of expression is reversible and corresponds to T cell cytotoxicity. At top: percent killing of target HeLa cells by T cells is shown. At bottom: activator and inhibitor receptor expression as assayed by FACS.

[0100] FIG. 41B is a series of plots showing that activator surface loss of expression is reversible and corresponds to T cell cytotoxicity. At top: percent killing of target HeLa cells by T cells is shown. At bottom: activator and inhibitor receptor expression as assayed by FACS.

[0101] FIG. 42 shows an embodiment of an effector T cell.

[0102] FIG. 43 is bar graphs demonstrating that the cytotoxic T-cell lymphocyte (CTL) response of engineered effector T cells is suppressed by normal cells (rounds 1, 3, 5 and 7). Exposure to tumor cells (rounds 2, 4, and 6) activates the CTL response. UTD: untransduced.

[0103] FIG. 44A is a set of plots showing that engineered receptors with HLA-A*02 blocker LBDs lose blocking ability in the presence of HLA-A*02 donors (1) and A*02-blocker is expressed but occupied by HLA-A*02 cis interaction (2). A*02-blocker binds to A*02 in cis and hinders blocker function in Jurkat and in primary T cells.

[0104] FIG. 44B is a diagram showing an autocrine signaling mechanism in an immune cell expressing an inhibitory receptor. The diagram shows that knockout of natively expressed MHC class I polypeptides reduces inhibition mediated by autocrine signaling.

[0105] FIG. 45 is a diagram showing the process for selecting HLA-A*02 targeting guide sequences.

[0106] FIG. 46 is a series of histograms and plots derived from FACS analysis of cells transfected with guide nucleic acids (gRNA) of the disclosure. The gRNA knockout efficiency (% indel) of HLA-A*02 was measured by staining Jurkat cells with fluorescently labeled anti-HLA-A*02 antibody (HLA-A*02 staining) following transfection with gRNA. Knockout efficiency of HLA-A, HLA-B, and HLA-C was also determined by staining the Jurkat cells with a fluorescently labeled anti-HLA-A/B/C antibody (Class I HLA staining). Predicted “on- and off-” target coverage for Class I HLA genes and off-targets is shown in the heatmap.

[0107] FIG. 47 is a series of FACS-derived histograms depicting rescue of HLA-A*02 ligand binding capacity in cells expressing an HLA-A*02-specific blocking receptor. gRNA-16 mediated knockout was performed in T cells from three HLA-A*02 positive (A*02+) donors (D A2-16, D 5886, and D 1042) and one HLA-A*02 negative (A*02−) donor. T cells were stained with an HLA-A*02 binding probe.

[0108] FIG. 48 is a schematic showing illustrative regions of the HLA-A*02 mRNA targeted by interfering shRNAs of the disclosure.

[0109] FIG. 49 is a series of histograms (left) and a plot (right) derived from fluorescence activated cell sorting (FACS) analysis of HLA-A*02 expressing Jurkat cells transfected with shRNA of the disclosure that target coding sequence (CDS) region of the HLA-A*02 mRNA. The shRNA knockdown efficiency of HLA-A*02 expression was measured by staining Jurkat cells with fluorescently labeled anti-HLA-A*02 antibody (HLA-A*02), following transfection with shRNA.

[0110] FIG. 50 is a series of histograms derived from fluorescence activated cell sorting (FACS) analysis of Jurkat cells co-transfected with HLA-A*02 and shRNA of the disclosure that target the 5′ and 3′ untranslated regions of HLA-A*02 mRNA. The shRNA-mediated reduction of HLA-A, HLA-B, and HLA-C(HLA Class I) expression was measured by staining Jurkat cells with fluorescently labeled anti-HLA-A/B/C antibody.

[0111] FIG. 51 is a pair of plots and inset histograms showing Jurkat cell activation and the binding capacity of the HLA-A*02 blocker module to its ligand, pMHC tetramer, in the presence (right) and absence (left) of HLA-A targeting shRNA.

[0112] FIG. 52 is a schematic showing gRNA targeting sequences of the disclosure mapped onto the target sequences of the B2M gene.

[0113] FIG. 53 is a pair of histogram series derived from fluorescence activated cell sorting (FACS) analysis of HLA-A*02 expressing Jurkat cells transfected with guide nucleic acids (gRNA) of the disclosure that target the B2M gene. The gRNA knockout efficiency of HLA-A*02 was measured by staining Jurkat cells with fluorescently labeled anti-HLA-A*02 antibody (HLA-A*02) following transfection with single guide RNA (sgRNA):Cas9 complexes. Knockout efficiency of HLA-A, HLA-B, and HLA-C(HLA Class I) was also determined by staining the Jurkat cells with a fluorescently labeled anti-HLA-A/B/C antibody.

[0114] FIG. 54 is a pair of histogram series derived from FACS analysis of HLA-A*02 expressing primary T cells transfected with guide nucleic acids (gRNA) of the disclosure that target the B2M gene. The gRNA knockout efficiency of HLA-A*02 was measured by staining the cells with fluorescently labeled anti-HLA-A*02 antibody (HLA-A*02) following transfection with sgRNA:Cas9 complexes. Knockout efficiency of HLA-A, HLA-B, and HLA-C (HLA Class I) was also determined by staining the primary T cells with a fluorescently labeled anti-HLA-A/B/C antibody.

[0115] FIG. 55 is a series of plots and inset histograms showing Jurkat cell activation and the binding capacity of the HLA-A*02 blocker module to its ligand, pMHC tetramer, in the presence and absence of B2M targeting Cas9:sgRNA complexes.

[0116] FIG. 56 is a series of FACS plots showing the effect on cell surface expression of HLA Class I complex, HLA-A*02 and binding capacity of the HLA-A*02 blocker receptor to its ligand, pMHC tetramer, in primary T cells in the presence and absence of B2M targeting Cas9:sgRNA complexes.

[0117] FIG. 57 is a diagram showing the effect of truncating the putative B2M promoter region on cell surface expression of HLA Class I complexes.

[0118] FIG. 58 is a diagram showing the regions of the putative B2M promoter region targeted by gRNA targeting sequences of the disclosure.

[0119] FIG. 59 is a pair of histogram series derived from fluorescence activated cell sorting (FACS) analysis of HLA-A*02-positive primary T cells transfected with guide nucleic acids (gRNA) of the disclosure that target either the B2M coding sequence (B2M 3, B2M 5, and B2M 6) or the putative B2M gene promoter region. Staining was done at 72 hours (left panel) or 144 hours (right panel) post-transfection.

[0120] FIG. 60 is a schematic showing illustrative regions of the B2M mRNA targeted by interfering shRNAs of the disclosure.

[0121] FIG. 61 is a pair of series of histograms and plots derived from fluorescence activated cell sorting (FACS) analysis of HLA-A*02 expressing Jurkat cells transfected with shRNA of the disclosure that target B2M mRNA. The shRNA knockout efficiency of HLA-A*02 expression was measured by staining Jurkat cells with fluorescently labeled anti-HLA-A*02 antibody (HLA-A*02), following transfection with shRNA. Knockout efficiency of HLA-A, HLA-B, and HLA-C(HLA Class I) was also determined by staining the Jurkat cells with a fluorescently labeled anti-HLA-A/B/C (HLA Class I) antibody.

[0122] FIG. 62 is a series of plots and insert histograms showing Jurkat cell activation and the binding capacity of the HLA-A*02 blocker module (inhibitory receptor) to its ligand, pMHC tetramer, in the presence (right) and absence (left) of B2M targeting shRNA.

[0123] FIG. 63 is a cartoon showing a modified T cell of the disclosure. The T cell expresses both an activator and inhibitory (blocker) receptor of the disclosure, in which beta-2− microglobulin (B2M) has been knocked out. Knock-out or knock down of B2M (B2M(−)) controls the host versus graft allogeneic response (host versus graft disease, HvG or HvGD), while the presence of the inhibitory receptor on the T cell controls the graft versus host allogeneic response (graft versus host diseases, GvH or GvHD).

[0124] FIG. 64 is a cartoon showing a modified T cell of the disclosure (graft cell, top) and a host T cell (bottom) following transplantation, and the interactions between the two cells. CTL: cytotoxic T lymphocyte. The T cell receptor on the graft TCR is indicated with the alpha, beta, gamma, delta and epsilon units (lower portion of the cell), while the activator and blocker receptors are as indicated. The host T cell expresses the indicated class I MHC complexes which can activate both the TCR and the blocker receptor on the grafted T cell.

[0125] FIG. 65A are a pair of cartoons (top) and fluorescence activated cell sorting (FACS) plots showing primary T cell transduced with f an NY-ESO-1 TCR (left), or co-transduced with an NY-ESO-1 TCR and HLA-A*02 LIR1 inhibitory receptor (right).

[0126] FIG. 65B is a pair of plots showing that the NY-ESO-1 TCR mediated killing of effector T cells co-cultured with A375 target cells expressing NY-ESO-1 and HLA-A*02 is blocked when the effectors cells also express an HLA-A*02 LIR1 blocker receptor.

[0127] FIG. 65C is a plot showing that the KRAS TCR mediated killing of effector T cells co-cultured with HuCTT1 target cells expressing KRAS-G12D/A11 and HLA-A*02 is blocked when the effectors cells also express an HLA-A*02 LIR1 blocker receptor.

[0128] FIG. 66 is a series of plots showing that the blocker receptor controls the allogeneic cytolytic response similarly to T cells in which TRAC (T cell receptor alpha constant) has been knocked out (KO). UTD: untransduced, TRAC+ cells; Blocker: blocker receptor; KO: knock out; allo: allogeneic; E:T, effector:target ratio

[0129] FIG. 67A is a series of plots showing proliferation (top row) and activation (bottom row) of primary T cells from donor 1 that were co-cultured with T cell depleted PBMCs from a second (donor 2). From left to right: Allo, primary T cells from donor 1; Allo+Blocker, primary T cells from donor 1 expressing the blocker receptor; Allo no TCR, primary T cells from donor 1 in which TRAC has been knocked out; Autologous, T cells from donor 1 cultured with T cell depleted PBMCs from donor 1.

[0130] FIG. 67B is a plot showing cytokine (interferon gamma, or IFNG) production by T cells without (T-cell only) and with co-culture with T cell depleted PBMCs (MLR). Allo, primary T cells from donor 1; Allo+Blocker, primary T cells from donor 1 expressing the blocker receptor; Allo no TCR, primary T cells from donor 1 in which TRAC has been knocked out; Autologous, T cells from donor 1 cultured with T cell depleted PBMCs from donor 1; D2 target only, D2 target cells (T cell depleted PBMCs) only.

[0131] FIG. 68A is a series of plots showing proliferation (top row) and activation (bottom row) of primary T cells from donor 1 expressing an EGFR chimeric antigen receptor (CAR) that were co-cultured with T cell depleted PBMCs from a second (donor 2). From left to right: UTD, untransduced; EGFR CAR, primary T cells from donor 1 expressing EGFR CAR; EGFR CAR+Blocker, primary T cells from donor 1 expressing the EGFR CAR and the blocker receptor; Non-allo, T cells from donor 1 cultured with T cell depleted PBMCs from donor 1.

[0132] FIG. 68B is a plot showing cytokine (interferon gamma, or IFNG) production by T cells expressing the EGFR CAR, without (T-cell only) and with co-culture with T cell depleted PBMCs (MLR). From left to right: UTD, untransduced; EGFR CAR, primary T cells from donor 1 expressing EGFR CAR; EGFR CAR+Blocker, primary T cells from donor 1 expressing the EGFR CAR and the blocker receptor; Autologous, T cells from donor 1 cultured with T cell depleted PBMCs from donor 1; D2 target cells only, D2 target cells (T cell depleted PBMCs) only.

[0133] FIG. 69 is a diagram showing an in vivo experiment to assay the allogeneic graft versus host effect of T cells expressing the blocker and activator receptor pair of the disclosure.

[0134] FIG. 70A is a diagram showing one method of generating B2M(−) T cells expressing the blocker and activator receptor pair of the disclosure.

[0135] FIG. 70B is a plot showing that B2M knockout using CRISPR/Cas9 and the methods shown in FIG. X8A reduced HLA expression on the surface of T cells expressing activator and blocker receptors. T cells from 8 donors are shown.

[0136] FIG. 71 is a series of plots showing that T cells in which B2M has been knocked out are protected from T cell killing and show limited susceptibility to NK cell killing.

[0137] FIG. 72 is a diagram showing one method of generating B2M(−) T cells expressing the blocker and activator receptor pair of the disclosure.

[0138] FIG. 73A is a diagram showing one method of generating B2M(−) T cells expressing the blocker and activator receptor pair of the disclosure using an shRNA (short hairpin RNA) specific to B2M.

[0139] FIG. 73B is a plot showing that transducing T cells from four donors with a lentiviral vector comprising an activator receptor, an inhibitory receptor and a B2M shRNA reduced HLA expression on the T cells.

[0140] FIG. 74 is a diagram showing an experiment to test the effect of B2M knock-out or knock down in graft T cells on T or NK cell killing from host cells. Allo: allogeneic; E:T, ratio of host to graft cells.

[0141] FIG. 75 is a series of plots showing the effect of B2M knock down or knock-out on host NK or T cell mediated killing graft T cells expressing the activator and blocker receptors of the disclosure.

[0142] FIG. 76 is a series of plots that show that HLA-A*02 knock out efficiency is similar across multiple HLA-targeting gRNAs, and is similar to that achieved with two B2M-targeting gRNAs.

[0143] FIG. 77 is a series of plots that show that the HLA-16 gRNA improves blocking in an A*02(+) donor and does not negatively impact blocking in A*02(−) donors. SCR: cells were transfected with a scrambled gRNA sequence.

[0144] FIG. 78 is a series of FACS plots that show that knock out of B2M and HLA-A with B2M and HLA-A targeting gRNAs restores tetramer binding. SCR: cells were transfected with a scrambled gRNA sequence.

### DETAILED DESCRIPTION

[0145] The inventors have developed a solution to the problems of identifying suitable markers and therapeutic targets and achieving cell selectivity in the treatment of diseases, particularly cancers, with adoptive cellular therapy. The primary object of the invention is an immune cell used in adoptive cell therapy that has reduced autocrine signaling. The immune cell can target cells, for example, based on loss of heterozygosity (FIG. 1). The immune cells use a two receptor system, in which activator and inhibitory signals are integrated at the cellular level within the immune cell (FIGS. 2A, 2B, 3A and 3B), by which selective targeting of tumor but not non-tumor cells is achieved. Differences in expression of surface proteins that are absent or lost in target cells but present in normal cells are thereby converted to a targeted anti-tumor cell therapy. These differences improve targeting by cell therapies, and protect normal cells from the cytotoxic effects of effector cells used for adoptive cell therapies.

[0146] The two receptor system described herein can be expressed in allogeneic immune cells specifically engineered to decrease complications such as graft versus host disease (GvHD) and host versus graft disease (HvG).

[0147] The two receptor system described herein can also be expressed in autologous immune cells. These autologous immune cells can be specifically engineered to decrease complications such as inhibitory signals between the immune cells used in the adoptive therapy.

[0148] The inhibitory signals described herein, in some embodiments, are mediated by an inhibitory receptor, expressed by immune cells described herein, comprising a ligand binding domain specific to a class I major histocompatibility complex (MHC-I) molecule, or a peptide-MHC complex thereof. Native expression of an MHC-I molecule by the immune cells can potentially bind to and activate or inactivate the inhibitory receptor. Such binding and activation/inactivation can occur through both inter- and intra-cellular interactions. Inter-cellular binding and activation/inactivation occurs when a natively expressed MHC-I molecule on immune cell binds and activates/inactivates an inhibitory receptor on a separate engineered immune cell expressing an inhibitory receptor. Intra-cellar inhibitory receptor binding can occur when, for example, the inhibitory receptor binds to an MHC-I molecule natively expressed on the same immune cell (FIGS. 4A and 4B). As described herein, both the inter- and intra-cellular binding/signaling of the inhibitory receptor on or among engineered immune cells are referred to as autocrine signaling or binding. Both intra- and inter-cellular inactivation can result in undesired inhibition at, for example, the site of a target activator or in a preparation or composition comprising a plurality of the immune cell. The inventors of the present disclosure have recognized that the undesired autocrine signaling and binding can be suppressed if the immune cell comprises one or more modification that reduce autocrine signaling by the receptor (FIG. 4B). In some embodiments, the one or more modifications to the immune cell comprises an inactivating mutation in an endogenous gene encoding an allele of an endogenous MHC class I polypeptide specifically bound by the inhibitory receptor (FIGS. 4A-4B).

[0149] The inventors of the present disclosure have recognized that the undesired autocrine binding/signaling can be suppressed if the immune cell has reduced or eliminated human leukocyte antigen (HLA) expression or function. HLA expression or function can be reduced or eliminated by targeting an HLA-A gene or allele thereof, e.g. HLA-A*02, with an interfering RNA molecule. In some embodiments, the immune cell comprises an interfering RNA, e.g. an shRNA complementary to a portion of the HLA-A messenger RNA (mRNA) transcript. HLA-A is a component of MHC class I complex. In the MHC class I complex, B2M binds the a chain to form a complex on the cell surface. Viewed across the cell membrane with the cytoplasm down, the α1 domain is directly above B2M, and α1 and B2M lie adjacent to α2 and α3, the latter of which is linked to a transmembrane domain. Without wishing to be bound by theory, it is thought that reduced or eliminated expression or function of HLA-A interferes with the formation of the MHC class I complex, leading to immune cells with greatly reduced or absent MHC class I on the cell surface.

[0150] In some embodiments, the one or more modifications to the immune cell comprises an inactivating mutation in beta-2-microglobulin (B2M, or β2m). B2M is a component of MHC class I molecules. In the MHC class I complex, B2M lies beside the α3 chain on the cell surface. The α1 chain is directly above B2M, and α1 and B2M lie adjacent to α2 and α3, the latter of which includes a transmembrane domain. Without wishing to be bound by theory, it is thought that in the absence of B2M, the MHC class I complex is unable to form, leading to immune cells with greatly reduced or absent MHC class I on the cell surface.

[0151] The inventors have developed a solution to the problems of identifying suitable therapeutic targets and achieving cell selectivity in the treatment of diseases, particularly cancers, with adoptive cellular therapy. The immune cell used in the adoptive cell therapies of the disclosure can target cells, for example, based on loss of heterozygosity (FIG. 1). The immune cells use a two receptor system, in which activator and inhibitory signals are integrated at the cellular level within the immune cells (FIGS. 2A, 2B, 3A and 3B), by which selective targeting of tumor but not non-tumor cells is achieved. Differences in expression of surface proteins that are absent or lost in target cells but present in normal cells are thereby converted to a targeted anti-tumor cell therapy. These differences improve targeting by cell therapies, and protect normal cells from the cytotoxic effects of effector cells used for adoptive cell therapies.

[0152] The two receptor system described herein can be expressed in allogeneic immune cells specifically engineered to reduce host versus graft disease. Two challenges to allogeneic adoptive cell therapy include graft versus host disease (GvHD), and host versus graft disease (HvG). In GvHD, donor immune cells attack healthy cells of the recipient. In HvG, host immune cells attack the transplanted cells, decreasing their persistence and reducing the effectiveness of the adoptive cell therapy. In conventional approaches to allogeneic adoptive cell therapy, donor immune cells, such as T cells, are engineered such that the cells do not express functional endogenous T cell receptors, whose activation can lead to GvHD. The donor T cells are further engineered to remove expression of the major histocompatibility class I complex (MHC I), which can induce a cytotoxic response in host immune cells leading to HvG. Thus, allogeneic immune cells used in conventional approaches typically undergo multiple genetic modifications in addition to those required to express an activating receptor. For example, these allogeneic immune cells may have one or more TCR subunits, such as TRAC, knocked out or down, and one or more MHC class I subunits, such as B2M, knocked out or down. However, it has unexpectedly been found that some embodiments of the blocker receptor of the dual receptor system described herein can block activation of donor immune cells that via endogenous TCRs. Thus, allogeneic immune cells (donor cells) of the disclosure that express the dual receptor system described herein can be advantageously rendered suitable for allogeneic transplant with fewer modifications compared to conventional allogeneic approaches. For example, allogeneic immune cells of the disclosure comprising the activator and blocker (also referred to as inhibitory) receptors described herein, in which MHC I has been reduced or eliminated, but which still express endogenous TCR receptors, can be suitable for allogeneic transplantation.

[0153] The two receptor system described herein can also be expressed in autologous immune cells, and can decrease the toxicity associated with certain adoptive cell therapies and two expand the range of molecular targets available for cancer. The inventors of the present disclosure have recognized that the undesired autocrine signaling and binding can be suppressed if the immune has reduced or eliminated beta-2-microglobulin (B2M) expression or function. B2M expression or function can be reduced or eliminated by targeting B2M with an interfering RNA molecule. (FIG. 4B). In some embodiments, the immune cell comprises an interfering RNA, e.g. an shRNA complementary to a portion of the beta-2-microglobulin (B2M, or β2m) messenger RNA (mRNA) transcript. B2M is a component of MHC class I complex. In the MHC class I complex, B2M lies beside the α3 domain of the a chain on the cell surface. The α1 domain is directly above B2M oriented in a typical structure diagram of the protein complex, and α1 and B2M lie adjacent to α2 and α3, the latter of which is connected to a transmembrane domain. Without wishing to be bound by theory, it is thought that reduced or eliminated expression or function of B2M interferes with the formation of the MHC class I complex-, leading to immune cells with greatly reduced or absent MHC class I on the cell surface.

[0154] In some embodiments, the immune cell described herein comprises one or more modifications. In some embodiments, the modifications comprise inactivating mutations in an endogenous gene encoding an allele of an endogenous MHC class I polypeptide. While it is advantageous for the immune cells disclosed herein to be modified with an inactivating mutation targeting a single allele of an endogenous MHC class I polypeptide, inactivating mutations to both alleles of an endogenous MHC class polypeptide is also encompassed by the disclosure. In addition, it may be advantageous to inactivate several loci of class I MHC gene complex and the alleles of those loci in the immune cells. In some embodiments, the modifications comprise inactivating mutations in an endogenous gene encoding both alleles of an endogenous MHC class I polypeptide. In some embodiments, the endogenous MHC class I polypeptide is bound specifically by an inhibitory receptor expressed by the immune cell described herein. In some embodiments, the MHC class I polypeptide is HLA-A, HLA-B, and/or HLA-C. In some embodiments, the MHC class I polypeptide is HLA-A. In some embodiments, the MHC class I polypeptide is HLA-A*02. In some polypeptides the MHC class I polypeptide is HLA-A*02:01.

[0155] The immune cell described herein can be modified using any methods known in the art. In a particular embodiment, the immune cells are modified using a CRISPR/Cas gene editing system. The immune cells described herein, according to an embodiment, can be modified to express or be transiently exposed to a CRISPR/Cas gene editing system comprising a nucleic acid guided endonuclease. In some embodiments, the nucleic acid guided endonuclease is a class II endonuclease, such as Cas9 or Cas12. In some embodiments, the nucleic acid guided endonuclease is directed to a target gene locus using a target-specific guide nucleic acid. The gene editing system can be used to modify the immune cell described herein to delete, inactivate, reduce expression, or otherwise inhibit function of a target gene or a target gene product.

[0156] In some embodiments, the immune cell described herein comprises an inhibitory receptor comprising a binding domain specific to a class I major histocompatibility complex (MHC-I) molecule, or a peptide-MHC complex thereof, wherein expression and/or function of human leukocyte antigen (HLA) in said immune cell has been reduced or eliminated. In particular embodiments, the immune cells comprise an interfering RNA, comprising a sequence complementary to a sequence of a HLA-A*02 mRNA. In some embodiments, the interfering RNA is capable of inducing RNA interference (RNAi) mediated degradation of the HLA-A*02 mRNA. The immune cells described herein, according to some embodiments, comprise a short hairpin RNA. In some embodiments, the shRNA comprises a first sequence and a second sequence, wherein the first sequence, has from 5′ to 3′ a sequence complementary to the HLA-A*02 mRNA; and wherein the second sequence, has from 5′ to 3′ end a sequence complementary to the first sequence, wherein the first sequence and second sequence form the shRNA. In an immune cell comprising the shRNA, the HLA-A gene product is reduced or eliminated in expression and/or function. In some embodiments, an immune cell comprising the shRNA has reduced or eliminated expression, — or function of an MHC-I molecule.

[0157] In one aspect, the disclosure provides guide nucleic acids targeting an endogenous MHC class I polypeptide. In some embodiments, the guide nucleic acids target the B2M gene.

[0158] In some embodiments, the immune cell described herein comprises an inhibitory receptor comprising a binding domain specific to a class I major histocompatibility complex (MHC-I) molecule, or a peptide-MHC complex thereof, wherein expression and/or function of beta-2-microglobulin (B2M) in said immune cell has been reduced or eliminated. In particular embodiments, the immune cells comprise an interfering RNA, comprising a sequence complementary to a sequence of a B2M mRNA. In some embodiments, the interfering RNA is capable of inducing RNA interference (RNAi) mediated degradation of the B2M mRNA. The immune cells described herein, according to some embodiments, comprise a short hairpin RNA. In some embodiments, the shRNA comprises a first sequence and a second sequence, wherein the first sequence, has from 5′ to 3′ a sequence complementary to the B2M mRNA; and wherein the second sequence, has from 5′ to 3′ end a sequence complementary to the first sequence, wherein the first sequence and second sequence form the shRNA. In an immune cell comprising the shRNA, the B2M gene product is reduced or eliminated in expression and/or function. In some embodiments, an immune cell comprising the shRNA is reduced or eliminated in expression or function of an MHC-I molecule.

[0159] In one aspect, the disclosure provides vectors for expressing the shRNA described herein in an immune cell. In another aspect, the disclosure provides methods of manufacturing the immune cells described herein.

[0160] In one aspect, disclosure provides compositions comprising the immune cells described herein.

[0161] In one aspect, the disclosure provides methods of treatment comprising administering the immune cells described herein to a subject in need thereof. In another aspect, the disclosure provides compositions comprising the immune cells described herein for use as a medicament in the treatment of a subject in need. In some embodiments, the subject suffers from or is at risk of cancer or a hematological malignancy.

[0162] This approach disclosed herein uses, in some embodiments, two engineered receptors, the first comprising a ligand binding domain for an activator ligand and the second comprising a ligand binding domain for an inhibitor ligand, which is selectively activated in target cells using an “AND NOT” Boolean logic (FIGS. 2A, 2B, 3A and 3B). Normal cells express both the activator and the inhibitor ligands, but activation of effector cells through the first receptor is blocked by binding of the second receptor comprising the inhibitor LBD to the inhibitor ligand, which exerts a protective effect and dominates the activity of the first, activator receptor. In contrast, in target cells that express the activator ligand but do not express the inhibitor ligand, binding of the activator ligand by the activator LBD leads to activation of the cell. Advantages of the dual activator/inhibitor receptor strategy of the instant disclosure include the ability to tune the activator and inhibitor combination to create a potent, but specific tumor-targeted adoptive cell therapy. Further, this approach can overcome the challenges of a variable effector to target cell ratio (E:T ratio) in the body, and the potentially massive excess of normal versus tumor cells seen when targeting tumor cells with adoptive cell therapies (e.g., 10¹³ normal cells versus 10⁹ tumor cells). Still further, the inventors have identified activators and inhibitors that cover large potential patient combinations, rendering this a commercially feasible approach.

[0163] Specificity of the adoptive cell therapy for a specific cell type can be achieved through the different activities of the first and second receptors, and the differential expression of the first and second ligands for the first and second receptors, respectively. Binding of the first ligand to the first receptor provides an activation signal, while binding of the second ligand to the second receptor prevents or reduces activation of effector cells even in the presence of the first ligand. The first ligand can be expressed more broadly than the second ligand, for example in both cells targeted by an adoptive cell therapy, and in healthy cells that are not target cells for an adoptive cell therapy (non-target cells). In contrast, the second ligand is expressed in the non-target cells, and is not expressed in the target cells. Only the target cells and not the non-target express the first and not the second ligand, thereby activating effector cells comprising the dual receptors of the disclosure in the presence of these cells.

[0164] The disclosure provides compositions and methods for targeting cells (e.g. tumor cells) based on loss of heterozygosity through use of two engineered receptors. The two engineered receptors, one an inhibitor and one activator, each comprise a different ligand binding domain that recognizes a different ligand. Differences in expression of the first and second ligands are used to selectively activate effector cells expressing the two receptors when only the first, activator ligand is present. Accordingly, in some embodiments, the first ligand binding domain and the second ligand binding domain are on different receptor molecules; i.e., separate receptors that are not part of a single genetic construct, fusion protein or protein complex. In some embodiments, one of the receptors activates the cell and other receptor inhibits the cell when each binds its cognate ligand. In some embodiments, the receptor comprising the second, inhibitor ligand binding domain dominates signaling so that if a target cell expresses both targets, the result is inhibition of the effector cell. Only when the inhibitory target is absent from the cell, does the first, activator ligand induce activation of the effector cell through the receptor comprising the first, activator ligand binding domain. In some embodiments, the first ligand is an activator ligand and the second ligand is an inhibitory ligand.

[0165] Any widely expressed cell surface molecule, for example a cell adhesion molecule, a cell-cell signaling molecule, an extracellular domain, a molecule involved in chemotaxis, a glycoprotein, a G protein-coupled receptor, a transmembrane, a receptor for a neurotransmitter or a voltage gated ion channel, or a peptide antigen of any of these, can be used as a first ligand. As a further example, the first ligand can be the transferrin receptor (TFRC). Any cell surface molecule not expressed on the surface of the target cell can be used as a second ligand. In those embodiments where an engineered receptor is used in the adoptive cell therapy to treat cancer, and the target cells are cancer cells, a second ligand may be chosen based on the loss of heterozygosity of the second ligand in cancer cells. Exemplary genes whose expression is frequently lost in cancer cells, for example due to mutations leading to loss of heterozygosity, include HLA class I alleles, minor histocompatibility antigens (MiHAs), and Y chromosome genes. In some embodiments, the first ligand is an activator ligand and the second ligand is an inhibitory ligand. In some embodiments, the HLA class I allele comprises HLA-A*02.

[0166] The disclosure further provides vectors and polynucleotides encoding the engineered receptors described herein.

[0167] The disclosure further provides methods of making immune cell populations comprising the engineered receptors described herein, and methods of treating disorders using the same.

### Definitions

[0168] Prior to setting forth this disclosure in more detail, it may be helpful to an understanding thereof to provide definitions of certain terms to be used herein.

[0169] Unless defined otherwise, all technical and scientific terms used herein have the same meaning as commonly understood by those of ordinary skill in the art to which the invention belongs. Although any methods and materials similar or equivalent to those described herein can be used in the practice or testing of particular embodiments, preferred embodiments of compositions, methods and materials are described herein. For the purposes of the present disclosure, the following terms are defined below. Additional definitions are set forth throughout this disclosure.

[0170] The articles “a,” “an,” and “the” are used herein to refer to one or to more than one (i.e., to at least one, or to one or more) of the grammatical object of the article. By way of example, “an element” means one element or one or more elements.

[0171] The use of the alternative (e.g., “or”) should be understood to mean either one, both, or any combination thereof of the alternatives.

[0172] The term “and/or” should be understood to mean either one, or both of the alternatives.

[0173] Throughout this specification, unless the context requires otherwise, the words “comprise”, “comprises” and “comprising” will be understood to imply the inclusion of a stated step or element or group of steps or elements but not the exclusion of any other step or element or group of steps or elements. By “consisting of” is meant including, and limited to, whatever follows the phrase “consisting of” Thus, the phrase “consisting of” indicates that the listed elements are required or mandatory, and that no other elements may be present. By “consisting essentially of” is meant including any elements listed after the phrase, and limited to other elements that do not interfere with or contribute to the activity or action specified in the disclosure for the listed elements. Thus, the phrase “consisting essentially of” indicates that the listed elements are required or mandatory, but that no other elements are present that materially affect the activity or action of the listed elements.

[0174] Reference throughout this specification to “one embodiment,” “an embodiment,” “a particular embodiment,” “a related embodiment,” “a certain embodiment,” “an additional embodiment,” “some embodiments,” or “a further embodiment” or combinations thereof means that a particular feature, structure or characteristic described in connection with the embodiment is included in at least one embodiment. Thus, the appearances of the foregoing phrases in various places throughout this specification are not necessarily all referring to the same embodiment. Furthermore, the particular features, structures, or characteristics may be combined in any suitable manner in one or more embodiments. It is also understood that the positive recitation of a feature in one embodiment, serves as a basis for excluding the feature in a particular embodiment.

[0175] As used herein, the term “about” or “approximately” refers to a quantity, level, value, number, frequency, percentage, dimension, size, amount, weight or length that varies by as much as 15%, 10%, 9%, 8%, 7%, 6%, 5%, 4%, 3%, 2% or 1% to a reference quantity, level, value, number, frequency, percentage, dimension, size, amount, weight or length. In one embodiment, the term “about” or “approximately” refers a range of quantity, level, value, number, frequency, percentage, dimension, size, amount, weight or length ±15%, ±10%, ±9%, ±8%, ±7%, ±6%, ±5%, ±4%, ±3%, ±2%, or ±1% about a reference quantity, level, value, number, frequency, percentage, dimension, size, amount, weight or length.

[0176] As used herein, the term “isolated” means material that is substantially or essentially free from components that normally accompany it in its native state. In particular embodiments, the term “obtained” or “derived” is used synonymously with isolated.

[0177] The terms “subject,” “patient” and “individual” are used interchangeably herein to refer to a vertebrate, preferably a mammal, more preferably a human. Tissues, cells, and their progeny of a biological entity obtained in vivo or cultured in vitro are also encompassed. A “subject,” “patient” or “individual” as used herein, includes any animal that exhibits pain that can be treated with the vectors, compositions, and methods contemplated herein. Suitable subjects (e.g., patients) include laboratory animals (such as mouse, rat, rabbit, or guinea pig), farm animals, and domestic animals or pets (such as a cat or dog). Non-human primates and, preferably, human patients, are included.

[0178] The term “allogeneic” refers to donor tissues or cells that are genetically dissimilar to the recipient receiving the cells or tissues, and which are therefore immunologically incompatible with the recipient.

[0179] The term “autologous” refers to cells or tissues obtained from the same subject.

[0180] As used herein “treatment” or “treating,” includes any beneficial or desirable effect, and may include even minimal improvement in symptoms. “Treatment” does not necessarily indicate complete eradication or cure of the disease or condition, or associated symptoms thereof.

[0181] As used herein, “prevent,” and similar words such as “prevented,” “preventing” etc., indicate an approach for preventing, inhibiting, or reducing the likelihood of a symptom of disease. It also refers to delaying the onset or recurrence of a disease or condition or delaying the occurrence or recurrence of the symptoms of a disease. As used herein, “prevention” and similar words also includes reducing the intensity, effect, symptoms and/or burden of disease prior to onset or recurrence.

[0182] As used herein, the term “amount” refers to “an amount effective” or “an effective amount” of a virus to achieve a beneficial or desired prophylactic or therapeutic result, including clinical results.

[0183] A “prophylactically effective amount” refers to an amount of a virus effective to achieve the desired prophylactic result. Typically but not necessarily, since a prophylactic dose is used in subjects prior to or at an earlier stage of disease, the prophylactically effective amount is less than the therapeutically effective amount.

[0184] A “therapeutically effective amount” of a virus or cell may vary according to factors such as the disease state, age, sex, and weight of the individual, and the ability of the virus or cell to elicit a desired response in the individual. A therapeutically effective amount is also one in which any toxic or detrimental effects of the virus or cell are outweighed by the therapeutically beneficial effects. The term “therapeutically effective amount” includes an amount that is effective to “treat” a subject (e.g., a patient).

[0185] An “increased” or “enhanced” amount of a physiological response, e.g., electrophysiological activity or cellular activity, is typically a “statistically significant” amount, and may include an increase that is 1.1, 1.2, 1.5, 2, 3, 4, 5, 6, 7, 8, 9, 10, 15, 20, 30 or more times (e.g., 500, 1000 times) (including all integers and decimal points in between and above 1, e.g., 1.5, 1.6, 1.7. 1.8, etc.) the level of activity in an untreated cell.

[0186] A “decrease” or “reduced” amount of a physiological response, e.g., electrophysiological activity or cellular activity, is typically a “statistically significant” amount, and may include an decrease that is 1.1, 1.2, 1.5, 2, 3, 4, 5, 6, 7, 8, 9, 10, 15, 20, 30 or more times (e.g., 500, 1000 times) (including all integers and decimal points in between and above 1, e.g., 1.5, 1.6, 1.7. 1.8, etc.) the level of activity in an untreated cell.

[0187] By “maintain,” or “preserve,” or “maintenance,” or “no change,” or “no substantial change,” or “no substantial decrease” refers generally to a physiological response that is comparable to a response caused by either vehicle, or a control molecule/composition. A comparable response is one that is not significantly different or measurable different from the reference response.

[0188] In general, “sequence identity” or “sequence homology” refers to an exact nucleotide-to-nucleotide or amino acid-to-amino acid correspondence of two polynucleotides or polypeptide sequences, respectively. Typically, techniques for determining sequence identity include determining the nucleotide sequence of a polynucleotide and/or determining the amino acid sequence encoded thereby, and comparing these sequences to a second nucleotide or amino acid sequence. Two or more sequences (polynucleotide or amino acid) can be compared by determining their “percent identity.” The percent identity of two sequences, whether nucleic acid or amino acid sequences, is the number of exact matches between two aligned sequences divided by the length of the shorter sequences and multiplied by 100. Percent identity may also be determined, for example, by comparing sequence information using the advanced BLAST computer program, including version 2.2.9, available from the National Institutes of Health. The BLAST program is based on the alignment method of Karlin and Altschul, Proc. Natl. Acad. Sci. USA 87:2264-2268 (1990) and as discussed in Altschul, et al., J. Mol. Biol. 215:403-410 (1990); Karlin And Altschul, Proc. Natl. Acad. Sci. USA 90:5873-5877 (1993); and Altschul et al., Nucleic Acids Res. 25:3389-3402 (1997). Briefly, the BLAST program defines identity as the number of identical aligned symbols (generally nucleotides or amino acids), divided by the total number of symbols in the shorter of the two sequences. The program may be used to determine percent identity over the entire length of the proteins being compared. Default parameters are provided to optimize searches with short query sequences in, for example, with the blastp program. The program also allows use of an SEG filter to mask-off segments of the query sequences as determined by the SEG program of Wootton and Federhen, Computers and Chemistry 17:149-163 (1993). Ranges of desired degrees of sequence identity are approximately 80% to 100% and integer values therebetween. Typically, the percent identities between a disclosed sequence and a claimed sequence are at least 80%, at least 85%, at least 90%, at least 95%, or at least 98%.

[0189] As used herein, a “subsequence” refers to a length of contiguous amino acids or nucleotides that form a part of a sequence described herein. A subsequence may be identical to a part of a full length sequence when aligned to the full length sequence, or less than 100% identical to the part of the full length sequence to which it aligns (e.g., 90% identical to 50% of the full sequence, or the like).

[0190] As used herein, a “polynucleotide system” refers to one or more polynucleotides. The one or more polynucleotides may be designed to work in concert for a particular application, or to produce a desired transformed cell.

[0191] The term “exogenous” is used herein to refer to any molecule, including nucleic acids, protein or peptides, small molecular compounds, and the like that originate from outside the organism. In contrast, the term “endogenous” refers to any molecule that originates from inside the organism (i.e., naturally produced by the organism).

[0192] The term “MOI” is used herein to refer to multiplicity of infection, which is the ratio of agents (e.g. viral particles) to infection targets (e.g. cells).

[0193] All publications and patents mentioned herein are hereby incorporated by reference in their entirety as if each individual publication or patent was specifically and individually indicated to be incorporated by reference. In case of conflict, the present application, including any definitions herein, will control. However, mention of any reference, article, publication, patent, patent publication, and patent application cited herein is not, and should not be taken as an acknowledgment, or any form of suggestion, that they constitute valid prior art or form part of the common general knowledge in any country in the world.

[0194] As used herein, a “target cell” refers to cell that is targeted by an adoptive cell therapy. For example, a target cell can be cancer cell, which can be killed by the transplanted T cells of the adoptive cell therapy. Target cells of the disclosure express an activator ligand as described herein, and do not express an inhibitor ligand.

[0195] As used herein, a “non-target cell” refers to cell that is not targeted by an adoptive cell therapy. For example, in an adoptive cell targeting cancer cells, normal, healthy, non-cancerous cells are non-target cells. Some, or all, non-target cells in a subject may express both the target antigen and the non-target antigen. Non-target cells in a subject may express the non-target antigen irrespective of whether or not these cells also express the target antigen.

[0196] The present description includes artificial receptors with activating and inhibiting activity. The artificial receptors are sometimes referred to as “activator receptors,” “inhibitor receptors,” or “engineered receptors.” Inhibitor receptors are sometimes referred to as “blockers,” “blocking receptors,” and the like.

[0197] “RNAi” or “RNA interference” refers to the process of sequence-specific post-transcriptional gene silencing, mediated by double-stranded RNA (dsRNA). Duplex RNAs such as siRNA (small interfering RNA), miRNA (micro RNA), shRNA (short hairpin RNA), ddRNA (DNA-directed RNA), piRNA (Piwi-interacting RNA), or rasiRNA (repeat associated siRNA) and modified forms thereof are all capable of mediating RNA interference. These dsRNA molecules may be commercially available or may be designed and prepared based on known sequence information. The anti-sense strand of these molecules can include RNA, DNA, PNA, or a combination thereof. DNA/RNA chimeric polynucleotides include, but are not limited to, a double-strand polynucleotide composed of DNA and RNA that inhibits the expression of a target gene. dsRNA molecules can also include one or more modified nucleotides, as described herein, which can be incorporated on either or both strands.

[0198] In RNAi gene silencing or knockdown, dsRNA comprising a first (anti-sense) strand that is complementary to a portion of a target gene and a second (sense) strand that is fully or partially complementary to the first anti-sense strand is introduced into an organism. After introduction into the organism, the target gene-specific dsRNA is processed into relatively small fragments (siRNAs) and can subsequently become distributed throughout the organism, decrease messenger RNA of target gene, leading to a phenotype that may come to closely resemble the phenotype arising from a complete or partial deletion of the target gene.

[0199] Certain dsRNAs in cells can undergo the action of Dicer enzyme, a ribonuclease III enzyme. Dicer can process the dsRNA into shorter pieces of dsRNA, i.e. siRNAs. RNAi also involves an endonuclease complex known as the RNA induced silencing complex (RISC). Following cleavage by Dicer, siRNAs enter the RISC complex and direct cleavage of a single stranded RNA target having a sequence complementary to the anti-sense strand of the siRNA duplex. The other strand of the siRNA is the passenger strand. Cleavage of the target RNA takes place in the middle of the region complementary to the anti-sense strand of the siRNA duplex. siRNAs can thus down regulate or knock down gene expression by mediating RNA interference in a sequence-specific manner.

[0200] As used herein, “target gene” or “target sequence” of an interfering refers to a gene or gene sequence whose corresponding RNA is targeted for degradation through the RNAi pathway using dsRNAs or siRNAs as described herein. To target a gene, for example using an siRNA, the siRNA comprises an anti-sense region complementary to, or substantially complementary to, at least a portion of the target gene or sequence, and sense strand complementary to the anti-sense strand. Once introduced into a cell, the siRNA directs the RISC complex to cleave an RNA comprising a target sequence, thereby degrading the RNA.

[0201] The term “chimeric antigen receptors” or “CARs” as used herein, may refer to artificial T-cell receptors, chimeric T-cell receptors, or chimeric immunoreceptors, for example, and encompass engineered receptors that graft an artificial specificity onto a particular immune effector cell, such as a helper T cell (CD4+), cytotoxic T cell (CD8+) or NK cell. CARs may be employed to impart the specificity of a monoclonal antibody onto a T cell, thereby allowing a large number of specific T cells to be generated, for example, for use in adoptive cell therapy. In specific embodiments, CARs direct specificity of the cell to a tumor associated antigen such as an HLA-E antigen. In some embodiments, CARs comprise an intracellular signaling domain, a transmembrane domain, and an extracellular domain comprising an antigen-binding region. In some embodiments, CARs comprise fusions of single-chain variable fragments (scFvs) or scFabs derived from monoclonal antibodies, fused to a transmembrane domain and intracellular signaling domain(s). The fusion may also comprise a hinge. Either heavy-light (H-L) and light-heavy (L-H) scFvs may be used. The specificity of CAR designs may be derived from antigens of receptors (e.g., peptides). Depending on the type of intracellular domain, a CAR can be an activator receptor or an inhibitory receptor. In some embodiments, for example when the CAR is an activator receptor, the CAR comprises domains for additional co-stimulatory signaling, such as CD3, FcR, CD27, CD28, CD137, DAP10, and/or OX40. In some embodiments, molecules can be co-expressed with the CAR, including co-stimulatory molecules, reporter genes for imaging (e.g., for positron emission tomography), gene products that conditionally ablate the T cells upon addition of a pro-drug, homing receptors, cytokines, and cytokine receptors. As used herein, characteristics attributed to a chimeric antigen receptor may be understood to refer to the receptor itself or to a host cell comprising the receptor.

[0202] As used herein, a “TCR”, sometimes also called a “TCR complex” or “TCR/CD3 complex” refers to a protein complex comprising a TCR alpha chain, a TCR beta chain, and one or more of the invariant CD3 chains (zeta, gamma, delta and epsilon), sometimes referred to as subunits. The TCR alpha and beta chains can be disulfide-linked to function as a heterodimer to bind to peptide-MHC complexes. Once the TCR alpha/beta heterodimer engages peptide-MHC, conformational changes in the TCR complex in the associated invariant CD3 subunits are induced, which leads to their phosphorylation and association with downstream proteins, thereby transducing a primary stimulatory signal. In an exemplary TCR complex, the TCR alpha and TCR beta polypeptides form a heterodimer, CD3 epsilon (CD3E) and CD3 delta (CD3D) form a heterodimer, CD3 epsilon and CD3 gamma (CD3G) for a heterodimer, and two CD3 zeta (CD3Z) form a homodimer.

[0203] The term “stimulation” refers to a primary response induced by binding of a stimulatory domain or stimulatory molecule (e.g., a TCR/CD3 complex) with its cognate antigen thereby mediating a signal transduction event, such as, but not limited to, signal transduction via the TCR/CD3 complex. Stimulation can mediate altered expression of certain molecules, and/or reorganization of cytoskeletal structures, and the like.

[0204] The term “stimulatory molecule” or “stimulatory domain” refers to a molecule or portion thereof that, when natively expressed by a T-cell, provides the primary cytoplasmic signaling sequence(s) that regulate activation of the TCR complex in a stimulatory way for at least some aspect of the T-cell signaling pathway. TCR alpha and/or TCR beta chains of wild type TCR complexes do not contain stimulatory domains and require association with CD3 subunits such as CD3 zeta to initiate signaling. In one aspect, the primary stimulatory signal is initiated by, for instance, binding of a TCR/CD3 complex with a major histocompatibility complex (MHC) bound to peptide, and which leads to mediation of a T-cell response, including, but not limited to, proliferation, activation, differentiation, and the like. One or more stimulatory domains, as described herein, can be fused to the intracellular portion of any one or more subunits of the TCR complex, including TCR alpha, TCR beta, CD3 delta, CD3 gamma and CD3 epsilon.

[0205] As used herein, a “domain capable of providing a stimulatory signal” refers to any domain that, either directly or indirectly, can provide a stimulatory signal that enhances or increases the effectiveness of signaling mediated by the TCR complex to enhance at least some aspect of T-cell signaling. The domain capable of providing a stimulatory signal can provide this signal directly, for example with the domain capable of providing the stimulatory signal is a primary stimulatory domain or co-stimulatory domain. Alternatively, or in addition, the domain capable of providing the stimulatory signal can act indirectly. For example, the domain can be a scaffold that recruits stimulatory proteins to the TCR, or provide an enzymatic activity, such as kinase activity, that acts through downstream targets to provide a stimulatory signal.

[0206] As used herein, “activation” of an immune cell or an immune cell that is “activated” is an immune cell that can carry out one or more functions characteristic of an immune response. These functions include proliferation, release of cytokines, and cytotoxicity, i.e. killing of a target cell. Activated immune cells express markers that will be apparent to persons of skill in the art. For example, activated T cells can express one or more of CD69, CD71, CD25 and HLA-DR. An immune cell expressing an activator receptor (e.g. a HLA-E CAR) can be activated by the activator receptor when it becomes responsive to the binding of the receptor to a target antigen (e.g. HLA-E) expressed by the target cell. A “target antigen” can also be referred to as an “activator antigen” and may be isolated or expressed by a target cell. Activation of an immune cell expressing an inhibitory receptor can be prevented when the inhibitory receptor becomes responsive to the binding of anon-target antigen (e.g. HLA-A*02), even when the activator receptor is bound to the target activator ligand. A “non-target antigen” can also be referred to as an “inhibitory ligand” or a “blocker”, and may be isolated or expressed by a target cell.

[0207] As used herein, a “domain capable of providing an inhibitory signal” refers to any domain that, either directly or indirectly, can provide an inhibitory signal that inhibits or decreases the effectiveness signaling mediated by the TCR complex. The domain capable of providing an inhibitory signal can reduce, or block, totally or partially, at least some aspect of T-cell signaling or function. The domain capable of providing an inhibitory signal can provide this signal directly, for example with the domain capable of providing the inhibitory signal provides a primary inhibitory signal. Alternatively, or in addition, the domain capable of providing the stimulatory signal can act indirectly. For example, the domain can recruit additional inhibitory proteins to the TCR, or can provide an enzymatic activity that acts through downstream targets to provide an inhibitory signal.

[0208] As used herein, “intracellular domain” refers to the cytoplasmic or intracellular domain of a protein, such as a receptor, that interacts with the interior of the cell, and carries out a cytosolic function. As used herein, “cytosolic function” refers to a function of a protein or protein complex that is carried out in the cytosol of a cell. For example, intracellular signal transduction cascades are cytosolic functions.

[0209] A polynucleotide is “operably linked” to another polynucleotide when it is placed into a functional relationship with the other polynucleotide. For example, a promoter or enhancer is operably linked to a coding sequence if it affects the transcription of the sequence. A peptide is “operably linked” to another peptide when the polynucleotides encoding them are operably linked, preferably they are in the same open reading frame.

[0210] A “promoter” is a sequence of DNA needed to turn a gene on or off. Promoters are located immediately upstream and/or overlapping the transcription start site, and are usually between about one hundred to several hundred base pairs in length.

[0211] Polymorphism refers to the presence of two or more variants of a nucleotide sequence in a population. A polymorphism may comprise one or more base changes, an insertion, a repeat, or a deletion. A polymorphism includes e.g. a simple sequence repeat (SSR) and a single nucleotide polymorphism (SNP), which is a variation, occurring when a single nucleotide of adenine (A), thymine (T), cytosine (C) or guanine (G) is altered.

[0212] As used herein, “specific to” or “specifically binds to” when used with respect to a ligand binding domain, such as an antigen binding domain, refers to a ligand binding domain that has a high specificity for a named target. Antibody specificity can viewed as a measure of the goodness of fit between the ligand binding domain and the corresponding ligand, or the ability of the ligand binding domain to discriminate between similar or even dissimilar ligands. In comparison with specificity, affinity is a measure of the strength of the binding between the ligand binding domain and ligand, such that a low-affinity ligand binding domain binds weakly and high-affinity ligand binding domain binds firmly. A ligand binding domain that is specific to a target allele is one that can discriminate between different alleles of a gene. For example, a ligand binding domain that is specific to HLA-A*02 will not bind, or bind more weakly to other HLA-A alleles such as HLA-A*01 or HLA-A*03. The person of skill in the art will appreciate that a ligand binding domain can be said to be specific to a particular target, and yet still have low levels of binding to one or more additional targets that do not affect its function in the receptor systems described herein. In the context of guide nucleic acids (gNA), a gNA with a targeting sequence that is “specific to” a target sequence is capable of binding to the target sequence and localizing the ribonucleoprotein (RNP) comprising the gNA to the target sequence.

[0213] In the present description, any concentration range, percentage range, ratio range, or integer range is to be understood to include the value of any integer within the recited range and, when appropriate, fractions thereof (such as one tenth and one hundredth of an integer), unless otherwise indicated. The term “about”, when immediately preceding a number or numeral, means that the number or numeral ranges plus or minus 10%.

[0214] As used herein, a “target antigen,” whether referred to using the term antigen or the name of a specific antigen, refers to an antigen expressed by a target cell, such as a cancer cell. Expression of target antigen is not limited to target cells. Target antigens may be expressed by both cancer cells and normal, non-cancer cells in a subject.

[0215] As used herein, a “non-target antigen” (or “blocker antigen”) whether referred to using the term antigen or the name of a specific antigen, refers to an antigen that is expressed by normal, non-cancer cells and is not expressed in cancer cells. This difference in expression allows the inhibitory receptor to inhibit immune cell activation in the presence of non-target cells, but not in the presence of target cells.

[0216] As used herein, “affinity” refers to strength of binding of a ligand to a single ligand binding site on a receptor, for example an antigen for the antigen binding domain of any of the receptors described herein. Ligand binding domains can have a weaker interaction (low affinity) with their ligand, or a stronger interaction (high affinity).

[0217] Kd, or dissociation constant, is a type of equilibrium constant that measures the propensity of a larger object to separate reversibly into smaller components, such as, for example, when a macromolecular complex comprising receptor and its cognate ligand separates into the ligand and the receptor. When the Kd is high, it means that a high concentration of ligand is need to occupy the receptor, and the affinity of the receptor for the ligand is low. Conversely, a low Kd means that the ligand has a high affinity for the receptor.

[0218] As used herein, a receptor that is “responsive” or “responsive to” refers to a receptor comprising an intracellular domain, that when bound by a ligand (i.e. antigen) generates a signal corresponding to the known function of the intracellular domain. An activator receptor bound to a target antigen can generate a signal that causes activation of an immune cell expressing the activator receptor. An inhibitory receptor bound to a non-target antigen can generate an inhibitory signal that prevents or reduces activation of an immune cell expressing the activator receptor. Responsiveness of receptors, and their ability to activate or inhibit immune cells expressing the receptors, can be assayed by any means known in the art and described herein, including, but not limited to, reporter assays and cytotoxicity assays.

[0219] Receptor expression on an immune cell can be verified by assays that report the presence of the activator receptors and inhibitory receptors described herein. For example, a population of immune cells can be stained with a labeled molecule (e.g. a fluorophore labeled receptor-specific antibody or a fluorophore-labeled receptor-specific ligand), and quantified using fluorescence activated cell sorting (FACS) flow cytometry. This method allows a percentage of immune cells in a population of immune cells to be characterized as expressing an activator receptor, an inhibitory receptor, or both receptors. The ratio of activator receptor and inhibitory receptors expressed by the immune cells described herein can be determined by, for example, digital droplet PCR. These approaches can be used to characterize the population of cells for the production and manufacturing of the immune cells, pharmaceutical compositions, and kits described herein. For the immune cells, pharmaceutical compositions, and kits described herein, it is understood that a suitable percentage of immune cells expressing both an activator receptor and an inhibitory receptor is determined specifically for the methods described herein. For example, a suitable percentage of immune cells expressing both an activator receptor and in inhibitory receptor can be at least 50%, at least 55%, at least 60%, at least 65%, at least 70%, at least 75%, at least 80%, at least 85%, at least 90%, or at least 95%. For example, a suitable percentage of immune cells expressing both an activator receptor and an inhibitory receptor can be at most 50%, at most 55%, at most 60%, at most 65%, at most 70%, at most 75%, at most 80%, at most 85%, at most 90%, or at most 95%. For example, a suitable ratio of activator receptor and inhibitory receptor in an immune cell can be about 5:1, about 4:1, about 3:1, about 2:1, about 1:1, about 1:2, about 1:3, about 1:4, or about 1:5. It is understood that purification, enrichment, and/or depletion steps can be used on populations of immune cells to meet suitable values for the immune cells, pharmaceutical compositions, and kits described herein.

[0220] A responsive receptor expressed by the immune cells described herein can be verified by assays that measure the generation of a signal expected to be generated by the intracellular domain of the receptor. Reporter cell lines, such as Jurkat-Luciferase NFAT cells (Jurkat cells), can be used to characterize a responsive receptor. Jurkat cells are derived from T cells and comprise a stably integrated nuclear factor of activated T-cells (NFAT)-inducible luciferase reporter system. NFAT is a family of transcription factors required for immune cell activation, whose activation can be used as a signaling marker for T cell activation. Jurkat cells can be transduced or transfected with the activator receptors and/or inhibitory receptors described herein. The activator receptor is responsive to the binding of a ligand if the Jurkat cell expresses a luciferase reporter gene, and the level of responsiveness can be determined by the level of reporter gene expression. The presence of luciferase can be determined using any known luciferase detection reagent, such as luciferin. An inhibitory receptor is responsive to the binding of a ligand if, when co-expressed with an activator receptor in Jurkat cells, it prevents a normally responsive immune cell from expressing luciferase in response to the activator receptor. For example, the responsiveness of an inhibitory receptor can be determined and quantified in a Jurkat cell expressing both an activator and an inhibitor by observing the following: 1) the Jurkat cell expresses luciferase in the presence of activator receptor ligand and absence of inhibitory receptor ligand; and 2) luciferase expression in the Jurkat cell is reduced or eliminated in the presence of both an activator receptor ligand and an inhibitory receptor ligand. This approach can be used to determine the sensitivity, potency, and selectivity of activator receptors and specific pairs of activator receptors and inhibitory receptors. The sensitivity, potency, and selectivity can be quantified by EC50 or IC50 values using dose-response experiments, where an activator receptor ligand and/or inhibitory receptor ligand is titrated into a culture of Jurkat cells expressing an activator receptor or a specific pair of activator and inhibitory receptors. Alternatively, the EC50 and IC50 values can be determined in a co-culture of immune cells (e.g. Jurkat cells or primary immune cells) expressing an activator receptor or a specific pair of activator and inhibitory receptors and target cells expressing an increasing amount of an activator ligand or inhibitor ligand. An increasing amount of activator ligand or inhibitor ligand can be accomplished in the target cell by, for example, titration of activator ligand or inhibitor ligand encoding mRNA into target cells, or use of target cells that naturally express different levels of the target ligands.

[0221] Activation of the immune cells described herein that express an activator receptor or specific pairs of activator and inhibitory receptors can be further determined by assays that measure the viability of a target cell following co-incubation with said immune cells. The immune cells, sometimes referred to as effector cells, are co-incubated with target cells that express an activator receptor ligand, an inhibitory receptor ligand, or both an activator and inhibitory receptor ligand. Following co-incubation, viability of the target cell is measured using any method to measure viability in a cell culture. For example, viability can be determined using a mitochondrial function assay that uses a tetrazolium salt substrate to measure active mitochondrial enzymes. Viability can also be determined using imaging based methods. Target cells can express a fluorescent protein, such as green fluorescent protein or red fluorescent protein. Reduction in total cell fluorescence indicates a reduction in viability of the target cell. A reduction in viability of the target cell following incubation with immune cells expressing an activator receptor or a specific pair of activator and inhibitory receptors is interpreted as target cell-mediated activation of the immune cell. A measure of the selectivity of the immune cells can also be determined using this approach. The immune cell expressing a pair of activator and inhibitory receptors is selective if the following is observed: 1) viability is reduced in target cells expressing the activator receptor ligand but not the inhibitory receptor ligand; 2) viability is not reduced in target cells expressing both an activator receptor ligand and an inhibitory receptor ligand. From these measurements, a “specific killing” value can be derived that quantifies the percentage of immune cell activation based on the reduction in viability of target cell as a percentage of a negative control (immune cells that do not express an activator receptor). Further, from these measurements a “selectivity ratio” value can be derived that represents the ratio of the specific killing observed in target cells expressing an activator receptor ligand in the absence of inhibitory receptor ligand to the specific killing observed in target cells expressing both an activator receptor ligand and an inhibitory receptor ligand. This approach can be used to characterize the population of cells for the production and manufacturing of the immune cells, pharmaceutical compositions, and kits described herein.

[0222] A suitable specific killing value for the immune cells, pharmaceutical compositions, and kits can be, for example, the following criteria: 1) at least 40%, at least 50%, at least 60%, at least 70%, at least 80%, at least 90%, at least 95%, at least 97% or at least 99% specific killing following a 48 hour co-incubation of immune cells and target cells expressing activator receptor ligand in the absence of inhibitory receptor ligand; and 2) less than or equal to 40%, less than or equal to 35%, less than or equal to 30%, less than or equal to 25%, less than or equal to 20%, less than or equal to 15%, less than or equal to 10%, less than or equal to 5%, less than or equal to 3% or less than or equal to 1% specific killing of target cell expressing both an activator receptor ligand and an inhibitory receptor ligand.

[0223] As a further example, a suitable specific killing value for the immune cells, pharmaceutical compositions and kits can be the following criteria: 1) between 30% and 99%, between 40% and 99%, between 50% and 99%, between 55% and 95%, between 60% and 95%, between 60% and 90%, between 50% and 80%, between 50% and 70% or between 50% and 60% of target cells expressing the activator ligand but not the inhibitor ligand are killed; and 2), between 1% and 40%, between 3% and 40%, between 5% and 40%, between 5% and 30%, between 10% and 30%, between 15% and 30% or between 5% and 20% of target cells expressing the activator ligand and the inhibitor ligand are killed.

[0224] As a still further example, a suitable specific killing value for the immune cells, pharmaceutical compositions, and kits can be, for example, the following criteria: 1) at least 50% specific killing following a 48 hour co-incubation of immune cells and target cells expressing activator receptor ligand in the absence of inhibitory receptor ligand; and 2) less than or equal to 20% specific killing of target cell expressing both an activator receptor ligand and an inhibitory receptor ligand. As a further example, the immune cells are capable of killing at least 30%, at least 40%, at least 50%, at least 60%, at least 70%, at least 80%, at least 90%, at least 95%, at least 97% or at least 99% of target cells expressing the activator ligand and not the inhibitor ligand over a period of 6 hours, 12 hours, 18 hours, 24 hours, 30 hours, 36 hours, 42 hours, 48 hours, 54 hours, or 60 hours, while killing less than 40%, less than 30%, less than 20%, less than 10%, less than 5%, less than 3% or less than 1% of target cells expressing the activator and inhibitor ligands over the same time period.

[0225] A suitable specific killing value of the target cell expressing an activator ligand in the absence of an inhibitory ligand value for the immune cells, pharmaceutical compositions, and kits can be, for example, at least about 50% to at least about 95%. A suitable specific killing value of the target cell expressing an activator ligand in the absence of an inhibitory ligand value for the immune cells, pharmaceutical compositions, and kits can be, for example, at least about 50%, at least about 55%, at least about 60%, at least about 65%, at least about 70%, at least about 75%, at least about 80%, at least about 85%, at least about 90%, or at least about 95%. A suitable specific killing value of the target cell expressing an activator ligand in the absence of an inhibitory ligand value for the immune cells, pharmaceutical compositions, and kits can be, for example, at most about 50%, at most about 55%, at most about 60%, at most about 65%, at most about 70%, at most about 75%, at most about 80%, at most about 85%, at most about 90%, or at most about 95%. A suitable specific killing value of target cells expressing both an activator receptor ligand and an inhibitory receptor ligand for the immune cells, pharmaceutical compositions, and kits can be can be less than about 50%, less than about 45%, less than about 40%, less than about 35%, less than about 30%, less than about 25%, less than about 20%, less than about 15%, less than about 10%, or less than about 5%. The suitable specific killing value for the immune cells, pharmaceutical compositions, and kits can be can be determined following about 6 hours, about 12 hours, about 18 hours, about 24, about 30 hours, about 36 hours, about 42 hours, about 48 hours, about 54 hours, about 60 hours, about 66 hours, or about 72 hours of co-incubation of immune cells with target cells.

[0226] A suitable specific killing value of the target cell expressing an activator ligand in the absence of an inhibitory ligand value for the immune cells, pharmaceutical compositions, and kits can be, for example, at least about 50% to at least about 95%. A suitable specific killing value of the target cell expressing an activator ligand in the absence of an inhibitory ligand value for the immune cells, pharmaceutical compositions, and kits can be, for example, at least about 50%, at least about 55%, at least about 60%, at least about 65%, at least about 70%, at least about 75%, at least about 80%, at least about 85%, at least about 90%, or at least about 95%. A suitable specific killing value of the target cell expressing an activator ligand in the absence of an inhibitory ligand value for the immune cells, pharmaceutical compositions, and kits can be, for example, at most about 50%, at most about 55%, at most about 60%, at most about 65%, at most about 70%, at most about 75%, at most about 80%, at most about 85%, at most about 90%, or at most about 95%. A suitable specific killing value of target cells expressing both an activator receptor ligand and an inhibitory receptor ligand for the immune cells, pharmaceutical compositions, and kits can be can be less than about 50%, less than about 45%, less than about 40%, less than about 35%, less than about 30%, less than about 25%, less than about 20%, less than about 15%, less than about 10%, or less than about 5%. The suitable specific killing value for the immune cells, pharmaceutical compositions, and kits can be can be determined following about 6 hours, about 12 hours, about 18 hours, about 24, about 30 hours, about 36 hours, about 42 hours, about 48 hours, about 54 hours, about 60 hours, about 66 hours, or about 72 hours of co-incubation of immune cells with target cells.

[0227] As used herein, the term “functional variant” refers to a protein that has one or more amino-acid substitutions, insertions, or deletions as compared to a parental protein, and which retains one or more desired activities of the parental protein. A functional variant may be a fragment of the protein (i.e. a variant having N- and/or C-terminal deletions) that retain the one or more desired activities of the parental protein.

[0228] All publications and patents mentioned herein are hereby incorporated by reference in their entirety as if each individual publication or patent was specifically and individually indicated to be incorporated by reference. In case of conflict, the present application, including any definitions herein, will control. However, mention of any reference, article, publication, patent, patent publication, and patent application cited herein is not, and should not be taken as an acknowledgment, or any form of suggestion, that they constitute valid prior art or form part of the common general knowledge in any country in the world.

### Allogeneic Immune Cells

[0229] The disclosure provides genetically engineered allogeneic immune cells for use in adoptive cell therapies. The allogeneic immune cells described herein can be modified using any strategies known in the art such as, and without limitation, gene editing to generate targeted gene knockdowns, knockouts, disruptions, insertions, deletions, frameshift mutations, mis-sense mutations, nonsense mutations or substitutions in a target gene, expression of RNAs such as for RNA interference, or expression of protein products which can disrupt gene function. Any technique known in the art that can be used to modify cells to impact on the expression of a target gene or the function of a target gene product is envisaged as within the scope of the instant methods. Genetic engineering strategies include use of gene editing technologies known in the art such as, without limitation, RNA interference (RNAi), Clustered Regularly Interspaced Short Palindromic Repeats (CRISPR)/Cas, transcription activator-like effector nuclease (TALEN), zinc finger nucleases (ZFN), or any technology used to achieve the goals of genetic editing allogeneic immune cells described herein. Genes targeted for editing in the allogeneic immune cells of the disclosure include TCRα, TCRβCD52, B2M, CD3, and/or human leukocyte antigen (HLA), such as HLA-A, HLA-B and/or HLA-C. The allogeneic immune cells of the disclosure can be engineered to modify a target locus leading to disruption of a target gene, or to express a construct, such as an RNAi or protein construct, that disrupts that the target gene or its gene product in trans.

[0230] Allogeneic therapeutic cells can serve as pre-manufactured cells, characterized in detail and available for immediate administration to patients in adoptive cell therapy. By allogeneic it is meant that the cells are obtained from individuals belonging to the same species but are genetically dissimilar. However, the use of allogeneic cells presently has many drawbacks. In immune-competent hosts allogeneic cells are rapidly rejected, a process termed host versus graft rejection (HvGD), and this substantially limits the efficacy of the transferred cells. In immune-incompetent hosts, allogeneic cells are able to engraft, but their endogenous TCR specificities recognize the host tissue as foreign, resulting in graft versus host disease (GvHD), which can lead to serious tissue damage and death. In order to effectively use allogeneic cells, both of these problems must be overcome. One strategy used to overcome these problems is targeted disruption of one or more genes encoding TCR subunits in allogeneic therapeutic cells for adoptive cell therapy. Additional strategies include targeted disruption of one or more genes encoding components of the major histocompatibility complex class I (MHC class I) such as HLA-A, HLA-B, HLA-C or beta-2-microglobulin (B2M), and knockout of CD52 in the allogeneic cells to facilitate lymphodepletion of host cells. In a further strategy, the presence of the inhibitory receptor described herein reduces the graft versus host effect, such that allogeneic cells can be employed in which the endogenous TCR receptor subunits are intact.

[0231] In some embodiments, the allogeneic immune cells are T cells. In some embodiments, the allogeneic T cells are cytotoxic T cells.

[0232] In some embodiments, the allogeneic immune cells express an endogenous TCR receptor. For example, the allogeneic immune cells express endogenous TCR gene products capable of reconstituting an endogenous TCR receptor. The present inventors have discovered that expressing an inhibitory receptor, as described herein, can inhibit the function of endogenous TCR receptors expressed by allogeneic immune cells. This approach allows for the expression of a TCR gene or gene product in allogeneic immune cells used for adoptive gene therapy. Avoiding the need to eliminate donor grafted T cell expression of endogenous TCRs is an advantage over allogeneic adoptive cell therapy methods known in the art, which generally require deletion or inhibition of endogenous TCRs.

[0233] In some embodiments, the allogeneic immune cells comprise an activator receptor, an inhibitory receptor, and an endogenous TCR (i.e., the allogeneic immune cells have not been modified to reduce or eliminate expression of one or more TCR subunits). In some embodiments, expression of an inhibitory receptor as described herein reduces GvHD. In some embodiments, expression of an inhibitory receptor by the allogeneic immune cells, for example an inhibitory receptor that targets HLA-A*02, reduces or eliminates GvHD.

[0234] In some embodiments, the allogeneic immune cells are modified to knock down, or knock out, one or more subunits of the endogenous TCR receptor by any of the methods described herein.

[0235] In immunocompetent hosts, allogeneic cells are rapidly rejected by the host immune system. For example, it has been demonstrated that allogeneic leukocytes present in non-irradiated blood products will persist for no more than 5 to 6 days. Thus, to prevent rejection of allogeneic cells, the host's immune system must be effectively suppressed. Glucocorticoidsteroids are widely used therapeutically for immunosuppression. This class of steroid hormones binds to the glucocorticoid receptor (GR) present in the cytosol of T cells resulting in the translocation into the nucleus and the binding of specific DNA motifs that regulate the expression of a number of genes involved in the immunologic process. Treatment of T cells with glucocorticoid steroids results in reduced levels of cytokine production leading to T cell anergy and interfering in T cell activation. Alemtuzumab, also known as CAMPATH1-H, is a humanized monoclonal antibody targeting CD52, a 12 amino acid glycosylphosphatidyl-inositol-(GPI) linked glycoprotein. CD52 is expressed at high levels on T and B lymphocytes and lower levels on monocytes while being absent on granulocytes and bone marrow precursors. Treatment with Alemtuzumab, a humanized monoclonal antibody directed against CD52, has been shown to induce a rapid depletion of circulating lymphocytes and monocytes. It is frequently used in the treatment of T cell lymphomas and in certain cases as part of a conditioning regimen for transplantation. However, in the case of adoptive immunotherapy, the use of immunosuppressive drugs will also have a detrimental effect on the introduced therapeutic T cells. Therefore, to effectively use an adoptive immunotherapy approach in these conditions, the introduced cells would need to be resistant to the immunosuppressive treatment.

[0236] Accordingly, the disclosure provides allogeneic immune cells that have been engineered to be resistant to targeted therapies specific to CD52, such as Alemtuzumab. Allogeneic immune cells can be engineered to be resistant to CD52 targeting therapies by knocking down, or knocking out, CD52 in the allogeneic immune cells using any of the methods described herein.

[0237] Modified T cells that lack expression of a target gene can be obtained by any suitable means, including a knock out or knock down of one or more subunit of a target gene. For example, the T cell can include a knock down of a target gene using siRNA, shRNA, clustered regularly interspaced short palindromic repeats (CRISPR), transcription-activator like effector nuclease (TALEN), or zinc finger endonuclease (ZFN).

[0238] The disclosure provides genetically engineered allogeneic immune cells. In some embodiments, the allogeneic immune cells are allogeneic T cells. In some embodiments, the allogeneic T cells described herein are genetically modified to express an activator receptor and an inhibitory receptor. In some embodiments, the allogeneic T cells described herein comprise additional genetic modifications. In some embodiments, the allogeneic T cells comprise reduced or eliminated expression of the gene encoding TCRα (e.g. T cell receptor alpha constant region, or TRAC). In some embodiments, the allogeneic T cells comprise reduced or eliminated expression or function of the gene encoding TCRβ (e.g. T cell receptor beta locus, or TRB). In some embodiments, the allogeneic T cells comprise reduced or eliminated expression or function of a gene encoding a CD3 subunit of a TCR (e.g., CD3D, CD3E, CD3G or CD3Z). In some embodiments, the allogeneic T cells described herein are genetically modified to contain a natural killer (NK) cell inhibitor component. The activator component can be, for example, an engineered receptor comprising a ligand binding domain that binds to an activator ligand, as described herein. The blocker component can be, for example, an engineered receptor comprising a second ligand binding domain that binds to an inhibitor ligand, as described herein. The NK cell inhibitor component can be, for example, human leukocyte antigen E (HLA-E), human leukocyte antigen G (HLA-G) or killer cell lectin like receptor C1 (KLRC1 or NKG2A) expression.

[0239] In some embodiments, the allogeneic immune cells described herein are genetically modified to reduce or eliminate expression of function of CD52.

[0240] In immune-incompetent hosts, allogeneic cells are able to engraft, but their endogenous TCR specificities recognize the host tissue as foreign, resulting in graft versus host disease (GvHD), which can lead to serious tissue damage and death. In some embodiments, the genetically engineered allogeneic immune cells comprise genetic edits to reduce or eliminate graft versus host disease (GvHD). In some embodiments, the genetically engineered allogeneic T cells comprise genetic edits to make TRAC gene (i.e., a gene encoding TCR alpha) to reduce or eliminate GvHD. In some embodiments, the genetically engineered allogeneic T cells comprise genetic edits to delete the TRB gene to reduce or eliminate GvHD. In some embodiments, the genetically engineered allogeneic immune cells comprise genetic edits to delete the gene encoding one or more CD3 T cell receptor subunits to reduce to eliminate GvHD.

[0241] In immune-competent hosts, allogeneic cells can rapidly be rejected, a process termed host versus graft rejection (HvGD), and this substantially limits the efficacy of the transferred cells. In some embodiments, the genetically engineered allogeneic T cells comprise genetic edits to reduce or eliminate host versus graft disease (HvGD) by reducing or eliminating one or more MHC class one components, and/or expressing an NK cell inhibitor such as HLA-E, HLA-G or NKG2A. In some embodiments, the genetically engineered allogeneic T cells comprise genetic edits to delete the B2M gene to reduce or eliminate HvGD. In some embodiments, expression of a B2M-targeting scFv reduces or eliminates HvGD.

[0242] In some embodiments, the genetically engineered allogeneic T cells comprise genetic edits to reduce or eliminate expression of the CD52 gene.

[0243] In some embodiments, the allogeneic immune cell comprises one or more modifications that reduce immune cell exhaustion, for example T cell exhaustion. As used herein, “T cell exhaustion” refers to the response of T cells to chronic antigen stimulation. Exhaustion is characterized by a step-wise and progressive loss of T cell function, and can culminate in physical elimination of the T cells. Exhaustion is regulated by a variety of inhibitory molecules such as immune checkpoint regulators, and, without wishing to be bound by theory, it is thought that by modifying expression of these molecules by the allogeneic immune cells, exhaustion of these cells can be ameliorated.

[0244] In some embodiments, the allogeneic immune cell can be a cell which does not express, or expresses at low levels, an inhibitory molecule that prevents T cell exhaustion. The allogeneic immune cell can be modified by any method described herein or known in the art. For example, the cell can be a cell that does not express, or expresses at low levels, an inhibitory molecule that can decrease the ability of the allogeneic immune cell to mount an immune effector response. Examples of inhibitory molecules include PD1, PD-L1, CTLA4, TIM3, CEACAM (e.g., CEACAM-1, CEACAM-3 and/or CEACAM-5), LAG3, VISTA, BTLA, TIGIT, LAIR1, CD160, 2B4 and TGFR beta. Modification of the allogeneic immune cell, e.g., by modification at DNA, RNA or protein level by any of the methods described herein, can optimize allogeneic immune cell performance. In some embodiments, an inhibitory nucleic acid, e.g., a dsRNA, siRNA or shRNA can be used. In some embodiments, the allogeneic immune cell can be modified using any of the methods described herein to mutate (full or partial deletion, substitution, insertion, frameshift mutation and the like) the locus encoding the inhibitory molecule.

[0245] Allogeneic immune cells, for example those that do not express a functional MHC class I complex, may also be targeted by host NK cells. Killing of allogeneic immune cells by host NK cells can reduce the survival, and therefore the efficacy, of the transplanted cells. One approach to mitigate NK cell mediated killing of transplanted allogeneic cells is through expression of a B2M-HLA fusion protein, for example B2M-HLA-E or B2M-HLA-G fusion proteins, by the transplanted cells. Exemplary fusion proteins that can protect allogeneic T cells from NK-cell mediated lysis are described in Guo et al., European Journal of Immunology (2021) 51: 2513-2521, the contents of which are incorporated by reference herein.

[0246] Accordingly, the disclosure provides a fusion protein comprising B2M protein fused to an HLA protein. In some embodiments, the HLA protein comprises HLA-E. In some embodiments, the HLA protein comprises HLA-G. In some embodiments, the B2M protein and HLA protein are separated by a linker, for example a glycine-serine linker as described herein. In some embodiments, the fusion protein further comprises a peptide, for example a peptide of 3-30 amino acids, 5-25, 5-20 or 5-15 amino acids. In some embodiments, the peptide is linked to B2M by a linker, such as a glycine-serine linker as described herein. Exemplary arrangements include, from N to C terminus, peptide-linker-B2M-linker-HLA-E, B2M-linker-HLA-E, peptide-linker-B2M-linker-HLA-G, and B2M-linker-HLA-G.

[0247] In some embodiments, the B2M and HLA portions of the fusion protein form a complex on the surface of an allogeneic immune cell. In some embodiments, the peptide, B2M and HLA portions of the fusion protein form a complex on the surface of an allogeneic immune cell.

[0248] The disclosure further provides immune cells comprising the B2M-HLA fusion proteins described herein, and vectors encoding the B2M-HLA fusion proteins described herein. In some embodiments, the vector comprises a promoter operably linked to the fusion protein, for example a constitutive promoter.

[0249] The skilled artisan will be able to select a suitable fusion protein based on genotype of the donor cells with respect to HLA, and the particular blocker receptor expressed by the allogeneic cells.

### Gene Targets

[0250] In some embodiments, the genetically engineered allogeneic immune cells described herein are modified to reduce or eliminate expression or function of a target gene. Exemplary target genes are described below.

### MHC Class I Genes and Polypeptides

[0251] In some embodiments, the genetically engineered allogeneic immune cells described herein are modified to reduce or eliminate expression of the B2M gene. The beta-2 microglobulin (B2M) gene encodes a protein that associates with the major histocompatibility complex (MHC) class I, i.e. MHC-I complex. The MHC-I complex is required for presentation of antigens on the cell surface. HLA-A, HLA-B and HLA-C genes that form part of MHC I are highly polymorphic, and when expressed on the surface of cells used in adoptive cell therapy can present as “non-self” and facilitate host rejection (HvGD). The MHC-I complex is disrupted and non-functional when the B2M is deleted (Wang D et al. Stem Cells Transl Med. 4:1234-1245 (2015)). Furthermore, the B2M gene can be disrupted with high efficiency using gene editing techniques known in the art (Ren et al. Clin. Cancer Res. 23:2255-2266 (2017)). Reducing or eliminating B2M can reduce, or eliminate functional MHC I on the surface of the allogeneic immune cell. The major histocompatibility complex (MHC) is a locus on the vertebrate genome that encodes a set of polypeptides required for the adaptive immune system. Among these are MHC class I polypeptides that include HLA-A, HLA-B, and HLA-C and alleles thereof. MHC class I alleles are highly polymorphic and expressed in all nucleated cells. MHC class I polypeptides encoded by HLA-A, HLA-B, and HLA-C and alleles thereof form heterodimers with (32 microglobulin (B2M) and present in complex with antigens on the surface of cells. In some embodiments, the immune cells of the disclosure are inactivated by an inhibitor ligand comprising an MHC class I polypeptide, e.g. HLA-A, HLA-B, and HLA-C and alleles thereof. HLA-A alleles can be, for example and without limitation, HLA-A*02, HLA-A*02:01, HLA-A*02:01:01, HLA-A*02:01:01:01, and/or any gene that encodes protein identical or similar to HLA-A*02 protein. Thus, to prevent autocrine signaling/binding as described herein, it is desirable to eliminate or reduce expression of polypeptides encoded by HLA-A, HLA-B, and HLA-C and alleles thereof in the immune cells.

[0252] In some embodiments, the genetically engineered allogeneic immune cells described herein are modified to inactivate or reduce or eliminate expression or function of an endogenous gene encoding an allele of an endogenous MHC class I polypeptide. In some embodiments, the gene encoding the MHC class I polypeptide is HLA-A, HLA-B and/or HLA-C. HLA-A, HLA-B and HLA-C are encoded by the HLA-A, HLA-B and HLA-C loci. Each of HLA-A, HLA-B and HLA-C includes many variant alleles, all of which are envisaged as within the scope of the instant disclosure. In some embodiments, the gene encoding the MHC class I polypeptide is HLA-A. In some embodiments, the gene encoding the MHC class I polypeptide is HLA-A*02. In some embodiments, the gene encoding the MHC class I polypeptide is HLA-A*02:01. In some embodiments, the gene encoding the MHC class I polypeptide is HLA-A*02:01:01. In some embodiments, the gene encoding the MHC class I polypeptide is HLA-A*02:01:01:01.

### CD52 Gene

[0253] In some embodiments, the genetically engineered allogeneic immune cells described herein are modified to reduce or eliminate expression or function of the CD52 gene. CD52 is a 12 amino acid glycosylphosphatidyl-inositol-(GPI) linked glycoprotein (Waldmann and Hale 2005). CD52 is expressed at high levels on T and B lymphocytes and lower levels on monocytes while being absent on granulocytes and bone marrow precursors. Alemtuzumab, also known as CAMPATH1-H, is a humanized monoclonal antibody targeting CD52. Treatment with Alemtuzumab, a humanized monoclonal antibody directed against CD52, has been shown to induce a rapid depletion of circulating lymphocytes and monocytes. It is frequently used in the treatment of T cell lymphomas and in certain cases as part of a conditioning regimen for transplantation and adoptive cell therapies. In the case of adoptive immunotherapy, the use of immunosuppressive drugs will also have a detrimental effect on the introduced therapeutic allogeneic immune cells. Therefore, to effectively use an adoptive immunotherapy approach in these conditions, the introduced cells, e.g. allogeneic immune cells, need to be resistant to the immunosuppressive treatment. Resistance to alemtuzumab-based lymphodepletion or conditioning can be achieved by reducing or eliminating CD52 expression in the allogeneic cells administered to the subject.

### TCR Subunits

[0254] In some embodiments, the genetically engineered allogeneic immune cells described herein comprise genetic edits to reduce or eliminate expression of the TCRα gene (TRAC). In some embodiments, the genetically engineered allogeneic immune cells described herein comprise genetic edits to reduce or eliminate expression of the TCRβ gene (TRB). T cell receptors (TCR) are cell surface receptors that participate in the activation of T cells in response to the presentation of antigen. The TCR includes two protein chains, alpha (TCRα) and beta (TCRβ), which assemble to form a heterodimer and associates with the CD3-transducing subunits to form the T-cell receptor complex present on the cell surface. Each alpha and beta chain of the TCR consists of an immunoglobulin-like N-terminal variable (V) and constant (C) region, a hydrophobic transmembrane domain, and a short cytoplasmic region. As for immunoglobulin molecules, the variable region of the alpha and beta chains are generated by V(D)J recombination, creating a large diversity of antigen specificities within the population of T cells. However, in contrast to immunoglobulins that recognize intact antigen, T cells are activated by processed peptide fragments in association with an MHC molecule, introducing an extra dimension to antigen recognition by T cells, known as MHC restriction. Recognition of MHC disparities between the donor and recipient through the T cell receptor leads to T cell proliferation and the potential development of GvHD. Normal surface expression of the TCR depends on the coordinated synthesis and assembly of all seven components of the complex. The disruption of TCRα and/or beta TCRβ can result in the elimination of the TCR from the surface of T cells, thereby preventing recognition of alloantigen and thus GvHD.

[0255] In some embodiments, the genetically engineered allogeneic immune cells described herein are modified to reduce or eliminate expression of a CD3 gene (CD3D, CD3E, CD3G and/or CD3Z). The CD3 genes form part of the TCR complex, and are required for activation of TCR. CD3 genes as referred to herein comprise the genes encoding the CD3γ, CD3δ, CD3ε, and CD3ξ proteins. The CD3 complex makes up the signaling component of an activated TCR complex, resulting in T cell expansion/proliferation, upregulation of activation markers on the T cell surface, and induction of cytotoxicity or cytokine secretion. Native T cell signaling in allogeneic immune cells can recognize normal host tissue as foreign, and thus result in GvHD. Targeted reduction or elimination of native CD3 genes in allogeneic immune cells can eliminate native T cell signaling and thus reduce or eliminate GvHD.

### Target Gene Sequences

[0256] The disclosure provides an immune cell comprising an inhibitory receptor comprising a ligand binding domain specific to a class I major histocompatibility complex (MHC-I) molecule, or a peptide-MHC complex thereof; wherein expression and/or function of beta-2− microgloobulin (B2M) in said immune cell has been reduced or eliminated. In some embodiments, the immune cell comprises an interfering RNA, comprising a sequence complementary an RNA sequence transcribed from the B2M gene

[0257] In some embodiments, the target gene is the B2M gene. In some embodiments, the interfering RNA is complementary to at least a portion of a B2M mRNA-B2M RNA comprises a coding sequence. In some embodiments, the B2M mRNA sequence comprises an untranslated region.

[0258] The disclosure provides an immune cell comprising an inhibitory receptor comprising a ligand binding domain specific to a class I major histocompatibility complex (MHC-I) molecule, or a peptide-MHC complex thereof; wherein the immune cell comprises one or more modifications that reduce autocrine signaling/binding by the receptor. In some embodiments, the modifications comprise an inactivating mutation in an endogenous target gene. In some embodiments, the endogenous target gene is B2M.

[0259] Target gene sequences include, but are not limited to, gene elements such as promoters, enhancers, introns, exons, intron/exon junctions, transcription products (pre-mRNA, mRNA, and splice variants), and/or 3′ and 5′ untranslated regions (UTRs). Any gene element or combination of gene elements may be targeted for the purpose of genetic editing in the allogeneic immune cells described herein.

[0260] Interfering RNAs of the disclosure target and bind to a target sequence through base pair complementarity. The interfering RNA has a complementary sequence to any region of a target gene sequence that is transcribed into RNA. In some embodiments, the target gene is HLA. In some embodiments, the target gene is B2M. Transcribed RNA can include intronic regions (introns), expressed regions (exons), untranslated regions (UTRs), coding sequences (CDS), or any other region of the target gene that undergoes transcription. Transcribed RNA can include primary transcripts, pre-mRNA, mature mRNA, and/or mRNA splice variants. RNA can include regulatory signals, such as polyA sites or polyA signal sequences. Transcribed RNA can include any non-coding region of the target gene that is not transcribed as part of an mRNA transcript, e.g. long noncoding RNA (lnRNA) or micro RNA (miRNA). Any transcribed region of the target gene may be targeted for the purpose of reducing or eliminating expression of the target gene in the immune cells described herein. Delivery of interfering RNA can be accomplished using any method known in the art to target gene transcripts that results in altered, disrupted, reduced, or eliminated expression or function the target gene or gene product. Examples of target gene sequences are set forth in SEQ ID NOs: 382-389.

[0261] The disclosure provides an immune cell comprising an inhibitory receptor comprising a ligand binding domain specific to a class I major histocompatibility complex (MHC-I) molecule, or a peptide-MHC complex thereof; wherein the immune cell comprises one or more modifications that reduce autocrine signaling/binding by the receptor. In some embodiments, the modifications comprise an inactivating mutation in an endogenous target gene.

[0262] Modifications to target genes can be accomplished using any method known in the art to edit the target gene that results in altered or disrupted expression or function the target gene or gene product.

[0263] In some embodiments, modifying the gene encoding the MHC class I polypeptide comprises deleting all or a portion of the gene. In some embodiments, modifying the gene encoding the MHC class I polypeptide comprises introducing a mutation in the gene. In some embodiments, the mutation comprises a deletion, insertion, substitution, or frameshift mutation. In some embodiments, modifying the gene comprises using a nucleic acid guided endonuclease.

[0264] The disclosure provides an immune cell comprising an inhibitory receptor comprising a ligand binding domain specific to a class I major histocompatibility complex (MHC-I) molecule, or a peptide-MHC complex thereof; wherein expression and/or function of human leukocyte antigen (HLA) in said immune cell has been reduced or eliminated. In some embodiments, the—immune cell comprises an interfering RNA, comprising a sequence complementary an RNA sequence transcribed from the HLA gene.

[0265] In some embodiments, the target gene is an allele of an endogenous MHC class I polypeptide specifically bound by the inhibitory receptor. In some embodiments, the gene encoding the MHC class I polypeptide is HLA-A, HLA-B, HLA-C, or a combination thereof. In some embodiments, the gene encoding the MHC class I polypeptide is HLA-A. HLA-A is a polymorphic gene whose various alleles may also be target genes for modification. The alleles may also be referred to as genes, and can include, for example, the HLA-A*02, HLA-A*02:01, HLA-A*02:01:01, and/or the HLA-A*02:01:01:01 alleles. In some embodiments, the gene encoding the MHC class I polypeptide is HLA-A*02. In some embodiments, the gene encoding the MHC class I polypeptide is HLA-A*02:01. In some embodiments, the gene encoding the MHC class I polypeptide is HLA-A*02:01:01. In some embodiments, the gene encoding the MHC class I polypeptide is HLA-A*02:01:01:01.

[0266] In some embodiments, the target gene is an HLA gene. In some embodiments, the HLA gene is the HLA-A gene. When used herein as a reference to a target gene or an associated transcript (e.g., mRNA), the HLA may refer to HLA-A, the HLA-A*02 allele, the HLA-A*02:01 allele, the HLA-A*02:01:01 allele, and/or the HLA-A*02:01:01:01 allele. In some embodiments, the HLA gene is the HLA-A*02 allele. In some embodiments, the HLA gene is the HLA-A*02:01 allele. In some embodiments, the HLA gene is the HLA-A*02:01:01 allele. In some embodiments, the HLA gene is the HLA-A*02:01:01:01 allele. In some embodiments, the interfering RNA is complementary to at least a portion of an mRNA transcribed from an HLA gene. In some embodiments, the mRNA is transcribed from an HLA-A*02 allele. In some embodiments, the mRNA is transcribed from an HLA-A*02:01 allele. In some embodiments, the mRNA is transcribed from an HLA-A*02:01:01 allele. In some embodiments, the mRNA is transcribed from an HLA-A*02:01:01:01 allele. In some embodiments, the mRNA comprises a coding sequence. In some embodiments, the mRNA sequence comprises an untranslated region.

[0267] Gene sequences for the target genes described herein are known in the art. The sequences can be found at public databases, such as NCBI GenBank or the NCBI nucleotide database. Sequences may be found using gene identifiers, for example, the HLA-A gene has NCBI Gene ID: 3105, the HLA-B gene has NCBI Gene ID: 3106, and the HLA-C gene has NCBI Gene ID: 3107. Gene sequences may also be found by searching public databases using keywords. For example, HLA-A alleles may be found in the NCBI nucleotide database by searching keywords, “HLA-A*02”, “HLA-A*02:01”, “HLA-A*02:01:01”, or “HLA-A*02:01:01:01.” These sequences can be used for targeting in various gene editing techniques known in the art. Non-limiting illustrative sequences for the target HLA-A allele gene sequences targeted for modification as described herein are set forth in SEQ ID NOs: 8346-8349 and 16871.

[0268] In some embodiments, the target gene or target gene sequence is a B2M gene or B2M gene sequence. In some embodiments, the target sequence is the coding sequence (CDS) of the B2M gene. In some embodiments, the target sequence is a promoter sequence. In some embodiments, the sequence is the B2M promoter.

[0269] In some embodiments, modifying the B2M gene comprises deleting all or a portion of the B2M gene. In some embodiments, modifying the B2M gene comprises introducing a mutation in the B2M gene. In some embodiments, the mutation comprises a deletion, insertion, substitution, or frameshift mutation. In some embodiments, modifying the gene comprises using a nucleic acid guided endonuclease.

[0270] Gene sequences for B2M and transcribed RNA will be known to persons of ordinary skill in the art. The B2M gene sequences and transcribed regions can be found at public databases, such as NCBI GenBank or the NCBI nucleotide database. Sequences may be found using gene identifiers, for example, the B2Mgene has NCBI Gene ID: 567 and NCBI Reference Sequence: NC 000015.10. Gene sequences may also be found by searching public databases using keywords. For example, B2M may be found in the NCBI nucleotide database by searching keywords, “B2M” or “beta-2-microglobulin.” Gene sequences include sequence elements such as, but not limited to, exons, coding sequences (CDS), introns, pre-cursor RNAs, mRNAs, and the like. Transcriptional regulatory elements controlling B2M expression, such as promoters and enhancers, are also considered part of the gene and can be targeted using the methods described herein. Any B2M gene transcribed sequence may be targeted by any gene editing methods known in the art or the interfering RNAs described herein (e.g. mRNA). Non-limiting illustrative sequences for B2M gene sequences and transcribed RNA sequences, of which the RNA sequences that can be targeted for modification or degradation by interfering RNAs as described herein are set forth in SEQ ID NOs: 8471, 8472, and 21897.

siRNA, miRNA, and shRNA to Inhibit Expression of a Target Protein

[0271] In some embodiments, expression of a target protein can be inhibited using an interfering RNA (RNA interference, or RNAi). In some embodiments, the interfering RNA is short interfering RNA (siRNA), microRNA (miRNA), or short hairpin RNA (shRNA) that targets a nucleic acid encoding the target protein in an allogeneic immune cell described herein. Expression of siRNA, miRNAs, and shRNAs in an allogeneic immune cell can be achieved using any expression system known in the art, e.g., a lentiviral expression system.

[0272] RNA interference (RNAi) is a process by which double-stranded RNA (dsRNA) is used to silence gene expression. While not wanting to be bound by theory, RNAi begins with the cleavage of longer dsRNAs into small interfering RNAs (siRNAs) by an RNaseIII-like enzyme, dicer. SiRNAs are dsRNAs that are usually about 19 to 28 nucleotides, or 20 to 25 nucleotides, or 21 to 22 nucleotides in length and often contain 2-nucleotide 3′ overhangs, and 5′ phosphate and 3′ hydroxyl termini. One strand of the siRNA is incorporated into a ribonucleoprotein complex known as the RNA-induced silencing complex (RISC). RISC uses this siRNA strand to identify mRNA molecules that are at least partially complementary to the incorporated siRNA strand, and then cleaves these target mRNAs or inhibits their translation. Therefore, the siRNA strand that is incorporated into RISC is known as the guide strand or the antisense strand. The other siRNA strand, known as the passenger strand or the sense strand, is eliminated from the siRNA and is at least partially homologous to the target mRNA. Those of skill in the art will recognize that, in principle, either strand of an siRNA can be incorporated into RISC and function as a guide strand. However, siRNA design (e.g., decreased siRNA duplex stability at the 5′ end of the antisense strand) can favor incorporation of the antisense strand into RISC.

[0273] RISC-mediated cleavage of mRNAs having a sequence at least partially complementary to the guide strand leads to a decrease in the steady state level of that mRNA and of the corresponding protein encoded by this mRNA. Alternatively, RISC can also decrease expression of the corresponding protein via translational repression without cleavage of the target mRNA. Other RNA molecules and RNA-like molecules can also interact with RISC and silence gene expression. Examples of other RNA molecules that can interact with RISC include short hairpin RNAs (shRNAs), single-stranded siRNAs, microRNAs (miRNAs), and dicer-substrate 27-mer duplexes. The term “siRNA” as used herein refers to a double-stranded interfering RNA unless otherwise noted. Examples of RNA-like molecules that can interact with RISC include RNA molecules containing one or more chemically modified nucleotides, one or more deoxyribonucleotides, and/or one or more non-phosphodiester linkages. For purposes of the present discussion, all RNA or RNA-like molecules that can interact with RISC and participate in RISC-mediated changes in gene expression will be referred to as “interfering RNAs.” SiRNAs, shRNAs, miRNAs, and dicer-substrate 27-mer duplexes are, therefore, subsets of “interfering RNAs.”

[0274] Interfering RNA of embodiments of the invention appear to act in a catalytic manner for cleavage of target mRNA, i.e., interfering RNA is able to effect inhibition of target mRNA in substoichiometric amounts. As compared to antisense therapies, significantly less interfering RNA is required to provide a therapeutic effect under such cleavage conditions.

[0275] Interfering RNAs can be designed for a target gene using methods known in the art. In embodiments of the present invention, interfering RNA target sequences (e.g., siRNA target sequences) within a target mRNA sequence are selected using available design tools. Techniques for selecting target sequences for siRNAs are provided by Tuschl, T. et al., “The siRNA User Guide.” revised May 6, 2004, available on the Rockefeller University web site; by Technical Bulletin #506, “siRNA Design Guidelines.” Ambion Inc. at Ambion's web site; and by other web-based design tools at, for example, the Invitrogen, Dharmacon, Integrated DNA Technologies, Genscript, or Proligo web sites. Initial search parameters can include G/C contents between 35% and 55% and siRNA lengths between 18 and 27 nucleotides. The target sequence may be located in the coding region or in the 5′ or 3′ untranslated regions of the mRNA.

[0276] Interfering RNAs are delivered to the cell using a construct made using methods known in the art. Constructs are commonly made by synthesizing the interfering RNA, annealing, and ligating two complementary oligonucleotides into an expression vector. Another known method uses PCR, whereby a promoter sequence serves as a template and the interfering sequence is contained in the reverse primer, and PCR results in an amplified cloning cassette comprising both promoter and interfering RNA. The amplified cassette is purified from truncated oligos by polyacrylamide gel electrophoresis prior to delivery to the cell. Another approach an interfering RNA template formed from two long partially complementary oligos of approximately equal length, overlapping at their 3′ ends. Each oligo serves as both template (for extending the opposite oligo) and primer (to copy the opposite oligo). Extension and repeated cycling generates a double-stranded product, akin to that generated in the annealed oligo method. The product can be further amplified by PCR with addition of another short primer binding the extended strand. Other methods for making and preparing interfering RNA constructs for cellular delivery and expression are known in the art (Timmons L. Methods Mol Biol. 351:109-117 (2006); Paul C et al. Nature Biotechnology. 20:505-508 (2002); Gupta S et al. PNAS 7:1927-1932 (2004)).

[0277] Exemplary shRNAs that downregulate expression of a target gene, such as components of the TCR are described, e.g., in US Publication No.: 2012/0321667. Exemplary siRNA and shRNA that downregulate expression of a target gene, as described herein, are described, e.g., in U.S. publication No.: US 2007/0036773.

### Illustrative Interfering RNAs

[0278] The disclosure provides interfering RNAs. The double stranded RNA molecule of the invention may be in the form of any type of RNA interference molecule known in the art. In some embodiments, the double stranded RNA molecule is a small interfering RNA (siRNA). In other embodiments, the double stranded RNA molecule is a short hairpin RNA (shRNA) molecule. In other embodiments, the double stranded RNA molecule is a Dicer substrate that is processed in a cell to produce an siRNA. In other embodiments the double stranded RNA molecule is part of a microRNA precursor molecule.

[0279] In some embodiments, the shRNA is a length to be suitable as a Dicer substrate, which can be processed to produce a RISC active siRNA molecule. See, e.g., Rossi et al., US2005/0244858.

[0280] A Dicer substrate double stranded RNA (e.g. a shRNA) can be of a length sufficient that it is processed by Dicer to produce an active siRNA, and may further include one or more of the following properties: (i) the Dicer substrate shRNA can be asymmetric, for example, having a 3′ overhang on the anti-sense strand, (ii) the Dicer substrate shRNA can have a modified 3′ end on the sense strand to direct orientation of Dicer binding and processing of the dsRNA to an active siRNA, for example the incorporation of one or more DNA nucleotides, and (iii) the first and second strands of the Dicer substrate ds RNA can be from 21-30 bp in length.

[0281] shRNAs of the disclosure may be generated exogenously by chemical synthesis, by in vitro transcription, or by cleavage of longer double-stranded RNA with Dicer or another appropriate nuclease with similar activity. Chemically synthesized siRNAs, produced from protected ribonucleoside phosphoramidites using a conventional DNA/RNA synthesizer, may be obtained from commercial suppliers such as Millipore Sigma (Houston, Tex.), Ambion Inc. (Austin, Tex.). Invitrogen (Carlsbad, Calif.), or Dharmacon (Lafayette, Colo.). siRNAs can be purified by extraction with a solvent or resin, precipitation, electrophoresis, chromatography, or a combination thereof, for example. Alternatively, siRNAs may be used with little if any purification to avoid losses due to sample processing.

[0282] In some embodiments, shRNAs of the disclosure can be produced using an expression vector into which a nucleic acid encoding the double stranded RNA has been cloned, for example under control of a suitable promoter.

[0283] In some embodiments, the interfering RNAs comprise a sequence complementary to a sequence of a HLA-A*02 mRNA. In some embodiments, the interfering RNA is capable of inducing RNAi-mediated degradation of the HLA-A*02 mRNA. In some embodiments, the HLA-A*02 mRNA sequence comprises a coding sequence. In some embodiments, the HLA-A*02 mRNA sequence comprises an untranslated region.

[0284] In some embodiments, the interfering RNA (is a short hairpin RNA (shRNA). In some embodiments, the shRNA comprises a first sequence, having from 5′ to 3′ end a sequence complementary to the HLA-A*02 mRNA; and a second sequence, having from 5′ to 3′ end a sequence complementary to the first sequence, wherein the first sequence and second sequence form the shRNA.

[0285] In some embodiments, the first sequence is 18, 19, 20, 21, or 22 nucleotides. In some embodiments, the first sequence is complementary to a sequence selected from SEQ ID NOs: 8476-15870. In some embodiments, the first sequence has GC content greater than or equal to 25% and less than 60%. In some embodiments, first sequence is complementary to a sequence selected from SEQ ID NOs: 8476-12066. In some embodiments, the first sequence does not comprise four nucleotides of the same base or a run of seven C or G nucleotide bases. In some embodiments, the first sequence is complementary to a sequence selected from SEQ ID NOs: 8476-11584. In some embodiments, the first sequence is complementary to a sequence selected from SEQ ID NO: 8476-8754. In some embodiments, the first sequence is complementary to a sequence selected from SEQ ID NOs: 8476-8561. Illustrative target HLA sequences complementary to the first sequence are set forth in SEQ ID NOs: 8476-8561. Target HLA sequences set forth herein may be presented as DNA sequences. In all target HLA sequences, thymine (T) may be replaced by uracil (U) to arrive at the sequence of the target mRNA sequence.

[0286] In some embodiments, the interfering RNAs comprise a sequence complementary to a sequence of a B2M mRNA. In some embodiments, the interfering RNA is capable of inducing RNAi-mediated degradation of the B2M mRNA. In some embodiments, the B2M mRNA sequence comprises a coding sequence. In some embodiments, the B2M mRNA sequence comprises an untranslated region.

[0287] In some embodiments, the shRNA comprises a first sequence, having from 5′ to 3′ end a sequence complementary to the B2M mRNA; and a second sequence, having from 5′ to 3′ end a sequence complementary to the first sequence, wherein the first sequence and second sequence form the shRNA.

[0288] In some embodiments, the first sequence is 18, 19, 20, 21, or 22 nucleotides. In some embodiments, the first sequence is complementary to a sequence selected from SEQ ID NOs: 16897-21508, 847-8474, and 8368-8370. In some embodiments, the first sequence has GC content greater than or equal to 25% and less than 60%. In some embodiments, the first sequence is complementary to a sequence selected from SEQ ID NOs: 16897-20484, 847-8474, and 8368-8370. In some embodiments, the first sequence does not comprise four nucleotides of the same base or a run of seven C or G nucleotide bases. In some embodiments, the first sequence is complementary to a sequence selected from SEQ ID NOs: 16897-19888, 847-8474, and 8368-8370. In some embodiments, the first sequence is 21 nucleotides. In some embodiments, the first sequence is complementary to a sequence selected from SEQ ID NOs: 16897-17478. In some embodiments, the first sequence is complementary to a sequence selected from SEQ ID NOs: 16897-17178. In some embodiments, the first sequence is complementary to a sequence selected from SEQ ID NOs: 16897-17034. Illustrative target B2M sequences complementary to the first sequence are set forth in SEQ ID NOs: 16897-17034.

[0289] In some cases, the first sequence may have 100% identity, i.e. complete identity, homology, complementarity to the target nucleic acid sequence. In other cases, there may be one or more mismatches between the first sequence and the target nucleic acid sequence. For example, there may be 1, 2, 3, 4, 5, 6, or 7 mismatches between the sense region and the target nucleic acid sequence.

[0290] In some embodiments, the first and second sequence are present on a single stranded polynucleotide, wherein the first sequence and second sequence are separated by 4, 5, 6, 7, 8, 9, 10, 11, 12, 13, 14, or 15 nucleotides, wherein the 4, 5, 6, 7, 8, 9, 10, 11, 12, 13, 14, or 15 nucleotides form a loop region in the shRNA. In some embodiments, the loop region comprises a sequence selected from SEQ ID NOs: 16872-16884, and 16895.

[0291] In some embodiments, the first sequence and second sequence are separated by a linker, sometimes referred to as a loop. In some embodiments, both the first sequence and the second sequence are encoded by one single-stranded RNA or DNA vector. In some embodiments, the loop is between the first and second sequences. In these embodiments, and the first sequence and the second sequence hybridize to form a duplex region. The first sequence and second sequence are joined by a linker sequence, forming a “hairpin” or “stem-loop” structure. The shRNA can have complementary first sequences and second sequences at opposing ends of a single stranded molecule, so that the molecule can form a duplex region with the complementary sequence portions, and the strands are linked at one end of the duplex region by a linker (i.e. loop sequence). The linker, or loop sequence, can be either a nucleotide or non-nucleotide linker. The linker can interact with the first sequence, and optionally, second sequence through covalent bonds or non-covalent interactions.

[0292] Any suitable nucleotide loop sequence is envisaged as within the scope of the disclosure. An shRNA of this disclosure may include a nucleotide, non-nucleotide, or mixed nucleotide/non-nucleotide linker that joins the first sequence of the shRNA to the second sequence of the shRNA. A nucleotide loop sequence can be >2 nucleotides in length, for example about 4, 5, 6, 7, 8, 9, 10, 11, 12, 13, 14, or 15 nucleotides in length.

[0293] Examples of a non-nucleotide linker include an abasic nucleotide, polyether, polyamine, polyamide, peptide, carbohydrate, lipid, polyhydrocarbon, or other polymeric agents, for example polyethylene glycols such as those having from 2 to 100 ethylene glycol units. Some examples are described in Seela et al., Nucleic Acids Research, 1987, Vol. 15, pp. 3113-3129; Cload et al., J. Am. Chem. Soc, 1991, Vol. 113, pp. 6324-6326; Jaeschke et al., Tetrahedron Lett., 1993, Vol. 34, pp. 301; Arnold et al., WO 1989/002439; Usman et al., WO 1995/006731; Dudycz et al., WO 1995/011910, and Ferentz et al., J. Am. Chem. Soc, 1991, Vol. 113, pp. 4000-4002.

[0294] In some embodiments, the shRNA further comprises a 5′ flank sequence and a 3′ flank sequence. In some embodiments, wherein the 5′ flank sequence is joined to the 5′ end of the first sequence, and wherein the 3′ flank sequence is joined to the 3′ end of the second sequence.

[0295] In some embodiments, the shRNA is capable of inducing RNAi-mediated degradation of the B2M mRNA. In some embodiments, the shRNA is encoded by a sequence comprising a sequence of GCACTCAAAGCTTGTTAAGATCGAAATCTTAACAAGCTTTGAGTGC (SEQ ID NO: 21900) or GTTAACTTCCAATTTACATACCGAAGTATGTAAATTGGAAGTTAAC (SEQ ID NO: 21901), or a sequence having at least 80%, at least 90%, or at least 95% identity thereto.

[0296] Without wishing to be bound by theory, it is thought that flanking shRNA stem loop sequence with 5′ and 3′ sequences similar to those found in microRNAs can target the shRNA for processing by the endogenous microRNA processing machinery, increasing the effectiveness of shRNA processing. Alternatively, or in addition, flanking sequences may increase shRNA compatibility with polymerase II or polymerase III promoters, leading to more effective regulation of shRNA expression.

[0297] In some embodiments, the 5′ flank sequence is selected from SEQ ID NO: 16885-16887. In some embodiments, the 3′ flank sequence is selected from SEQ ID NO: 16888, 16889, and 16896.

### Targeted Gene Editing Using Nucleic Acid Guided Endonuclease Systems

[0298] In some embodiments, a target gene (or target sequence) is edited in the allogeneic immune cells described herein using a nucleic acid guided endonuclease. Exemplary nucleic acid guided endonucleases include Class 2 endonucleases, such as CRISPR/Cas9.

[0299] “CRISPR” or “CRISPR gene editing” as used herein refers to a set of clustered regularly interspaced short palindromic repeats, or a system comprising such a set of repeats. “Cas”, as used herein, refers to a CRISPR-associated protein. A “CRISPR/Cas” system refers to a system derived from CRISPR and Cas which can be used to silence, knock out, or mutate a target gene.

[0300] Naturally-occurring CRISPR/Cas systems are found in approximately 40% of sequenced eubacteria genomes and 90% of sequenced archaea. This system is a type of prokaryotic immune system that confers resistance to foreign genetic elements such as plasmids and phages and provides a form of acquired immunity. The CRISPR/Cas system has been modified for use in gene editing (silencing, knock out, enhancing or changing specific genes) in eukaryotes. Wiedenheft et al. (2012) Nature 482: 331-8. This is accomplished by introducing into the eukaryotic cell a one or more specifically designed guide nucleic acids (gNAs), typically guide RNAs (gRNAs), and an appropriate Cas endonuclease which forms a ribonucleoprotein complex with the gNA. The gNA guides the gNA-endonuclease protein complex to a target genomic location, and the endonuclease introduces a double strand break at the target genomic location. This double strand break can be repaired by cellular mechanisms such non-homologous end joining (leading to deletions) or homologous repair (which can generate insertions), thereby introducing genetic modifications into the host cell genome.

[0301] CRISPR/Cas systems are classified by class and by type. Class 2 systems currently represent a single interference protein that is categorized into three distinct types (types II, V and VI). Any class 2 CRISPR/Cas system suitable for gene editing, for example a type II, a type V or a type VI system, is envisaged as within the scope of the instant disclosure. Exemplary Class 2 type II CRISPR systems include Cas9, Csn2 and Cas4. Exemplary Class 2, type V CRISPR systems include, Cas12, Cas12a (Cpf1), Cas12b (C2c1), Cas12c (C2c3), Cas12d (CasY), Cas12e (CasX), Cas12f, Cas12g, Cas12h, Cas12i and Cas12k (C2c5). Exemplary Class 2 Type VI systems include Cas13, Cas13a (C2c2) Cas13b, Cas13c and Cas13d.

[0302] The CRISPR sequence, sometimes called a CRISPR locus, comprises alternating repeats and spacers. In a naturally-occurring CRISPR, the spacers usually comprise sequences foreign to the bacterium such as a plasmid or phage sequence. As described herein, spacer sequences may also be referred to as “targeting sequences.” In CRISPR/Cas systems for a genetic engineering, the spacers are derived from the target gene sequence (the gNA).

[0303] As these CRISPR/Cas occurs naturally in many different types of bacteria, the exact arrangements of the CRISPR and structure, function and number of Cas genes and their product differ somewhat from species to species. For example, the Cse (Cas subtype, E. coli) proteins (e.g., CasA) form a functional complex, Cascade, that processes CRISPR RNA transcripts into spacer-repeat units that Cascade retains. Brouns et al. (2008) Science 321: 960-964. In other prokaryotes, Cas6 processes the CRISPR transcript. The CRISPR-based phage inactivation in E. coli requires Cascade and Cas3, but not Cm′ or Cas2. The Cmr (Cas RAMP module) proteins in Pyrococcus furiosus and other prokaryotes form a functional complex with small CRISPR RNAs that recognizes and cleaves complementary target RNAs.

[0304] An exemplary Class 2 type II CRISPR system relies on the protein Cas9, which is a nuclease with two active cutting sites, one for each strand of the double helix. Combining Cas9 and modified CRISPR locus RNA can be used in a system for gene editing. Pennisi (2013) Science 341: 833-836. In some embodiments, the Cas protein used to modify the allogeneic immune cells is Cas9.

[0305] The CRISPR/Cas system can thus be used to edit a target gene, such as a gene targeted for editing in the allogeneic immune cells described herein, by adding or deleting a base pair, or introducing a premature stop which thus decreases expression of the target. The CRISPR/Cas system can alternatively be used like RNA interference, turning off a target gene in a reversible fashion. In a mammalian cell, for example, the RNA can guide the Cas protein to a target gene promoter, sterically blocking RNA polymerases.

[0306] A Cas protein may be derived from any bacterial or archaeal Cas protein. Any suitable CRISPR/Cas system is envisaged as within the scope of the instant disclosure. In other aspects, Cas protein comprises one or more of Cas1, Cas1B, Cas2, Cas3, Cas4, Cas5, Cas6, Cas7, Cas8, Cas9, Cas10, Csy1, Csy2, Csy3, Cse1, Cse2, Csc1, Csc2, Csa5, Csn2, Csm2, Csm3, Csm4, Csm5, Csm6, Cmr1, Cmr3, Cmr4, Cmr5, Cmr6, Csb1, Csb2, Csb3, Csx17, Csx14, Csx10, Csx16, CsaX, Csx3, Csx1, Csx15, Csf1, Csf2, Csf3, Csf4, homologs thereof, or modified versions thereof. In some embodiments, the Cas protein is a Cas9 protein, a Cpf1 protein, a C2c1 protein, a C2c2 protein, a C2c3 protein, Cas3, Cas3-HD, Cas5, Cas7, Cas8, Cas10, or combinations or complexes of these. In some embodiments, the Cas protein is a Cas9 protein. In some embodiments, the Cas9 protein shares at least 90%, at least 95%, at least 96%, at least 97%, at least 98%, or at least 99% sequence identity to SEQ ID NO: 8350.

[0307] Artificial CRISPR/Cas systems can be generated which inhibit a target gene, using technology known in the art, e.g., that described in U.S. Publication No. 20140068797, and Cong (2013) Science 339: 819-823. Other artificial CRISPR/Cas systems that are known in the art may also be generated which inhibit a target gene, e.g., that described in Tsai (2014) Nature Biotechnol., 32:6 569-576, U.S. Pat. Nos. 8,871,445; 8,865,406; 8,795,965; 8,771,945; and 8,697,359. Methods of designing suitable gNAs for a particular Cas protein will be known by persons of ordinary skill in the art.

### Guide Nucleic Acids

[0308] The present disclosure provides gene-targeting guide nucleic acids (gNAs) that can direct the activities of an associated polypeptide (e.g., nucleic acid guided endonuclease) to a specific target gene sequence within a target nucleic acid genome. The genome-targeting nucleic acid can be an RNA. A genome-targeting RNA is referred to as a “guide RNA” or “gRNA” herein. A guide RNA can comprise at least a targeting sequence that hybridizes to a target nucleic acid sequence of interest, and a CRISPR repeat sequence. In some Type II systems, the gRNA also comprises a second RNA called the tracrRNA sequence, also referred to herein as a “scaffold” sequence. In the Type II guide RNA (gRNA), the CRISPR repeat sequence and scaffold sequence hybridize to each other to form a duplex. In the Type V guide RNA (gRNA), the crRNA forms a duplex. In both systems, the duplex can bind a site-directed polypeptide, such that the guide RNA and site-directed polypeptide form a complex. The gene-targeting nucleic acid can provide target specificity to the complex by virtue of its association with the site-directed polypeptide. The gene-targeting nucleic acid thus can direct the activity of the site-directed polypeptide.

[0309] In some embodiments, the disclosure provides a guide RNA comprising a targeting sequence and a guide RNA scaffold sequence, wherein the targeting sequence is complementary to the sequence of a target gene.

[0310] Exemplary guide RNAs include the targeting sequences of about 15-20 bases. As is understood by the person of ordinary skill in the art, each gRNA can be designed to include a targeting sequence complementary to its genomic target sequence. For example, each of the targeting sequences, e.g., the RNA version of the DNA sequences presented in SEQ ID NOs: 390-8344, can be put into a single RNA chimera or a crRNA (along with a corresponding scaffold sequence). See Jinek et al., Science, 337, 816-821 (2012) and Deltcheva et al., Nature, 471, 602-607 (2011).

[0311] The gene targeting nucleic acid can be a double-molecule guide RNA. The gene targeting nucleic acid can be a single-molecule guide RNA. The gene targeting nucleic acid can be any known configuration of guide RNA known in the art, such as, for example, including paired gRNA, or multiple gRNAs used in a single step. Although it is clear from genomic sequences where the coding sequences and splice junctions are, other features required for gene expression may be idiosyncratic and unclear.

[0312] A double-molecule guide RNA can comprise two strands of RNA. The first strand comprises a sequence in the 5′ to 3′ direction, an optional spacer extension sequence, a targeting sequence and a minimum CRISPR repeat sequence. The second strand can comprise a minimum tracrRNA sequence (complementary to the minimum CRISPR repeat sequence), a 3′ tracrRNA sequence and an optional tracrRNA extension sequence.

[0313] A single-molecule guide RNA (sgRNA) in a Type II system can comprise, in the 5′ to 3′ direction, an optional spacer extension sequence, a targeting sequence, a minimum CRISPR repeat sequence, a single-molecule guide linker, a minimum tracrRNA sequence, a 3′ tracrRNA sequence and an optional tracrRNA extension sequence. The optional tracrRNA extension can comprise elements that contribute additional functionality (e.g., stability) to the guide RNA. The single-molecule guide linker can link the minimum CRISPR repeat and the minimum tracrRNA sequence to form a hairpin structure. The optional tracrRNA extension can comprise one or more hairpins.

[0314] In some embodiments, guide RNA or single-molecule guide RNA (sgRNA) can comprise a targeting sequence and a scaffold sequence. In some embodiments, the scaffold sequence is a Cas9 gRNA sequence. In some embodiments, the scaffold sequence is encoded by a DNA sequence that comprises a sequence that shares at least 90%, at least 95%, at least 96%, at least 97%, at least 98%, or at least 99% identity to GTTTTAGAGCTAGAAATAGCAAGTTAAAATAAGGCTAGTCCGTTATCAACTTGAA AAAGTGGCACCGAGTCGGTGCTTTTTTT (SEQ ID NO: 8345). In some embodiments, the scaffold sequence is encoded by a DNA sequence that comprises GTTTTAGAGCTAGA AATAGCAAGTTAAAATAAGGCTAGTCCGTTATCAACTTGAAAAAGTGGCACCGA GTCGGTGCTTTTTTT (SEQ ID NO: 8345). In some embodiments, the scaffold sequence is encoded by a RNA sequence that comprises a sequence that shares at least 90%, at least 95%, at least 96%, at least 97%, at least 98%, or at least 99% identity to GUUUUAGAGCUAGAAAUAGCAAGUUAAAAUAAGGCUAGUCCGUUAUCAACUU GAAAAAGUGGCACCGAGUCGGUGCUUUUUUU (SEQ ID NO: 8473). In some embodiments, the scaffold sequence is encoded by a RNA sequence that comprises GUUUUAGAGCUAGAA AUAGCAAGUUAAAAUAAGGCUAGUCCGUUAUCAACUUGAAAAAGUGGCACCG AGUCGGUGCUUUUUUU (SEQ ID NO: 8473).

[0315] In some embodiments, for example those embodiments where the CRISPR/Cas system is a Cas9 system, the sgRNA can comprise a 20 nucleotide targeting sequence at the 5′ end of the sgRNA sequence. The sgRNA can comprise a less than a 20 nucleotide targeting sequence at the 5′ end of the sgRNA sequence. The sgRNA can comprise a more than 20 nucleotide targeting sequence at the 5′ end of the sgRNA sequence. The sgRNA can comprise a variable length targeting sequence with 17-30 nucleotides at the 5′ end of the sgRNA sequence.

[0316] In some embodiments, the sgRNA can comprise no uracil at the 3′ end of the sgRNA sequence. The sgRNA can comprise one or more uracils at the 3′ end of the sgRNA sequence. For example, the sgRNA can comprise 1 uracil (U) at the 3′ end of the sgRNA sequence. The sgRNA can comprise 2 uracil (UU) at the 3′ end of the sgRNA sequence. The sgRNA can comprise 3 uracil (UUU) at the 3′ end of the sgRNA sequence. The sgRNA can comprise 4 uracil (UUUU) at the 3′ end of the sgRNA sequence. The sgRNA can comprise 5 uracil (UUUUU) at the 3′ end of the sgRNA sequence. The sgRNA can comprise 6 uracil (UUUUUU) at the 3′ end of the sgRNA sequence. The sgRNA can comprise 7 uracil (UUUUUUU) at the 3′ end of the sgRNA sequence. The sgRNA can comprise 8 uracil (UUUUUUUU) at the 3′ end of the sgRNA sequence.

[0317] The sgRNA can be unmodified or modified. For example, modified sgRNAs can comprise one or more 2′-O-methyl phosphorothioate nucleotides.

[0318] A single-molecule guide RNA (sgRNA) in a Type II system, e.g. Cas9, can comprise, in the 5′ to 3′ direction, a minimum CRISPR repeat sequence and a targeting sequence.

[0319] By way of illustration, guide RNAs used in the CRISPR/Cas9 or CRISPR/Cpf1 system, or other smaller RNAs can be readily synthesized by chemical means, as illustrated below and described in the art. While chemical synthetic procedures are continually expanding, purifications of such RNAs by procedures such as high performance liquid chromatography (HPLC, which avoids the use of gels such as PAGE) tends to become more challenging as polynucleotide lengths increase significantly beyond a hundred or so nucleotides. One approach used for generating RNAs of greater length is to produce two or more molecules that are ligated together. Much longer RNAs, such as those encoding a Cas9 or Cpf1 endonuclease, are more readily generated enzymatically. Various types of RNA modifications can be introduced during or after chemical synthesis and/or enzymatic generation of RNAs, e.g., modifications that enhance stability, reduce the likelihood or degree of innate immune response, and/or enhance other attributes, as described in the art.

### Spacer Extension Sequence

[0320] In some examples of genome-targeting nucleic acids, a spacer extension sequence can modify activity, provide stability and/or provide a location for modifications of a genome-targeting nucleic acid. A spacer extension sequence can modify on- or off-target activity or specificity. In some examples, a spacer extension sequence can be provided. The spacer extension sequence can have a length of more than 1, 5, 10, 15, 20, 25, 30, 35, 40, 45, 50, 60, 80, 90, 100, 120, 140, 160, 180, 200, 220, 240, 260, 280, 300, 320, 340, 360, 380, 400, 1000, 2000, 3000, 4000, 5000, 6000, or 7000 or more nucleotides. The spacer extension sequence can have a length of less than 1, 5, 10, 15, 20, 25, 30, 35, 40, 45, 50, 60, 70, 80, 90, 100, 120, 140, 160, 180, 200, 220, 240, 260, 280, 300, 320, 340, 360, 380, 400, 1000, 2000, 3000, 4000, 5000, 6000, 7000 or more nucleotides. The spacer extension sequence can be less than 10 nucleotides in length. The spacer extension sequence can be between 10-30 nucleotides in length. The spacer extension sequence can be between 30-70 nucleotides in length.

[0321] The spacer extension sequence can comprise another moiety (e.g., a stability control sequence, an endoribonuclease binding sequence, a ribozyme). The moiety can decrease or increase the stability of a nucleic acid targeting nucleic acid. The moiety can be a transcriptional terminator segment (i.e., a transcription termination sequence). The moiety can function in a eukaryotic cell. The moiety can function in a prokaryotic cell. The moiety can function in both eukaryotic and prokaryotic cells. Non-limiting examples of suitable moieties include: a 5′ cap (e.g., a 7-methylguanylate cap (m7 G)), a riboswitch sequence (e.g., to allow for regulated stability and/or regulated accessibility by proteins and protein complexes), a sequence that forms a dsRNA duplex (i.e., a hairpin), a sequence that targets the RNA to a subcellular location (e.g., nucleus, mitochondria, chloroplasts, and the like), a modification or sequence that provides for tracking (e.g., direct conjugation to a fluorescent molecule, conjugation to a moiety that facilitates fluorescent detection, a sequence that allows for fluorescent detection, etc.), and/or a modification or sequence that provides a binding site for proteins (e.g., proteins that act on DNA, including transcriptional activators, transcriptional repressors, DNA methyltransferases, DNA demethylases, histone acetyltransferases, histone deacetylases, and the like).

### Targeting Sequence

[0322] The targeting sequence of a gRNA hybridizes to a sequence in a target nucleic acid of interest. The targeting sequence of a genome-targeting nucleic acid can interact with a target nucleic acid (or target sequence) in a sequence-specific manner via hybridization (i.e., base pairing). The nucleotide sequence of the targeting sequence can vary depending on the sequence of the target nucleic acid of interest.

[0323] In a Cas9 system described herein, the targeting sequence can be designed to hybridize to a target nucleic acid that is located 5′ of the reverse complement of a PAM of the Cas9 enzyme used in the system. The targeting sequence may perfectly match the target sequence or may have mismatches. Each CRISPR/Cas system protein may have a particular PAM sequence, in a particular orientation and position, that it recognizes in a target DNA. For example, S. pyogenes Cas9 recognizes in a target nucleic acid a PAM that comprises the sequence 5′-NRG-3′, where R comprises either A or G, where N is any nucleotide and N is immediately 3′ of the target nucleic acid sequence targeted by the targeting sequence. Selection of appropriate PAM sequences will be apparent to the person of ordinary skill in the art.

[0324] The target sequence is complementary to, and hybridizes with, the targeting sequence of the gRNA. The target nucleic acid sequence can comprise 20 nucleotides. The target nucleic acid can comprise less than 20 nucleotides. The target nucleic acid can comprise more than 20 nucleotides. The target nucleic acid can comprise at least: 5, 10, 15, 16, 17, 18, 19, 20, 21, 22, 23, 24, 25, 30 or more nucleotides. The target nucleic acid can comprise at most: 5, 10, 15, 16, 17, 18, 19, 20, 21, 22, 23, 24, 25, 30 or more nucleotides. In some embodiments, for example those embodiments where the CRISPR/Cas system is a Cas9 system, the target nucleic acid sequence can comprise 20 nucleotides immediately 5′ of the first nucleotide of the reverse complement of the PAM sequence. This target nucleic acid sequence is often referred to as the PAM strand or a target strand, and the complementary nucleic acid sequence is often referred to the non-PAM strand or non-target strand. One of skill in the art would recognize that the targeting sequence hybridizes to the non-PAM strand of the target nucleic acid, see e.g., US20190185849A1.

[0325] The targeting sequence that hybridizes to the target nucleic acid can have a length of at least about 6 nucleotides (nt). The targeting sequence can be at least about 6 nt, at least about nt, at least about 15 nt, at least about 18 nt, at least about 19 nt, at least about 20 nt, at least about 25 nt, at least about 30 nt, at least about 35 nt or at least about 40 nt, from about 6 nt to about 80 nt, from about 6 nt to about 50 nt, from about 6 nt to about 45 nt, from about 6 nt to about 40 nt, from about 6 nt to about 35 nt, from about 6 nt to about 30 nt, from about 6 nt to about 25 nt, from about 6 nt to about 20 nt, from about 6 nt to about 19 nt, from about 10 nt to about 50 nt, from about 10 nt to about 45 nt, from about 10 nt to about 40 nt, from about 10 nt to about 35 nt, from about 10 nt to about 30 nt, from about 10 nt to about 25 nt, from about 10 nt to about 20 nt, from about 10 nt to about 19 nt, from about 19 nt to about 25 nt, from about 19 nt to about 30 nt, from about 19 nt to about 35 nt, from about 19 nt to about 40 nt, from about 19 nt to about 45 nt, from about 19 nt to about 50 nt, from about 19 nt to about 60 nt, from about 20 nt to about 25 nt, from about 20 nt to about 30 nt, from about 20 nt to about 35 nt, from about 20 nt to about 40 nt, from about 20 nt to about 45 nt, from about 20 nt to about nt, or from about 20 nt to about 60 nt. In some examples, the targeting sequence can comprise 20 nucleotides. In some examples, the targeting can comprise 19 nucleotides. In some examples, the targeting can comprise 18 nucleotides. In some examples, the targeting can comprise 22 nucleotides.

[0326] In some examples, the percent complementarity between the targeting sequence and the target nucleic acid is at least about 30%, at least about 40%, at least about 50%, at least about 60%, at least about 65%, at least about 70%, at least about 75%, at least about 80%, at least about 85%, at least about 90%, at least about 95%, at least about 97%, at least about 98%, at least about 99%, or 100%. In some examples, the percent complementarity between the targeting sequence and the target nucleic acid is at most about 30%, at most about 40%, at most about 50%, at most about 60%, at most about 65%, at most about 70%, at most about 75%, at most about 80%, at most about 85%, at most about 90%, at most about 95%, at most about 97%, at most about 98%, at most about 99%, or 100%. In some examples, the percent complementarity between the targeting sequence and the target nucleic acid is 100% over the six contiguous 5′-most nucleotides of the target sequence of the complementary strand of the target nucleic acid. The percent complementarity between the targeting sequence and the target nucleic acid can be at least 60% over about 20 contiguous nucleotides. The length of the targeting sequence and the target nucleic acid can differ by 1 to 6 nucleotides, which may be thought of as a bulge or bulges.

[0327] The targeting sequence can be designed or chosen using computer programs known to persons of ordinary skill in the art. The computer program can use variables, such as predicted melting temperature, secondary structure formation, predicted annealing temperature, sequence identity, genomic context, chromatin accessibility, % GC, frequency of genomic occurrence (e.g., of sequences that are identical or are similar but vary in one or more spots as a result of mismatch, insertion or deletion), methylation status, presence of SNPs, and the like. Available computer programs can take as input NCBI gene IDs, official gene symbols, Ensembl Gene IDs, genomic coordinates, or DNA sequences, and create an output file containing sgRNAs targeting the appropriate genomic regions designated as input. The computer program may also provide a summary of statistics and scores indicating on- and off-target binding of the sgRNA for the target gene (Doench et al. Nat Biotechnol. 34:184-191 (2016)).

### Illustrative Targeting Sequences

[0328] The disclosure provides guide RNAs comprising a targeting sequence. In some embodiments, the guide RNA further comprises a guide RNA scaffold sequence. In some embodiments, the targeting sequence is complementary to the sequence of a target gene selected from the group consisting of HLA-A, HLA-B, HLA-C, or an allele thereof. In some embodiments, the target gene is a HLA-A gene. In some embodiments, the target gene is a HLA-B gene. In some embodiments, the target gene is a HLA-C gene. In some embodiments the target gene is HLA-A, HLA-B, HLA-C, or a combination thereof. Exemplary gRNA sequences targeting HLA-A are set forth in SEQ ID NOs: 390-509. Further exemplary gRNA sequences targeting HLA-A are set forth as SEQ ID NOs: 390-8344.

[0329] In some embodiments, the target gene is a HLA-A allele. In some embodiments, the HLA-A allele comprises HLA-A*02, HLA-A*02:01, HLA-A*02:01:01, and/or HLA-A*02:01:01:01. In some embodiments, the HLA-A allele is HLA-A*02. In some embodiments, the HLA-A*02 allele comprises a sequence that shares about 90%, about 95%, about 96%, about 97%, about 98%, about 99% identity to SEQ ID NO: 8346. In some embodiments, the HLA-A*02 allele comprises SEQ ID NO: 8346. In some embodiments, the HLA-A allele is HLA-A*02:01. In some embodiments, the HLA-A*02:01 allele comprises a sequence that shares about 90%, about 95%, about 96%, about 97%, about 98%, about 99% identity to SEQ ID NO: 8347. In some embodiments, the HLA-A*02:01 allele comprises SEQ ID NO: 8347. In some embodiments, the HLA-A allele is HLA-A*02:01:01. In some embodiments, the HLA-A*02:01:01 allele comprises a sequence that shares about 90%, about 95%, about 96%, about 97%, about 98%, about 99% identity to SEQ ID NO: 8348. In some embodiments, the HLA-A*02:01:01 allele comprises SEQ ID NO: 8348. In some embodiments, the HLA-A allele is HLA-A*02:01:01:01. In some embodiments, the HLA-A*02:01:01:01 allele comprises a sequence that shares about 90%, about 95%, about 96%, about 97%, about 98%, about 99% identity to SEQ ID NO: 8349. In some embodiments, HLA-A*02:01:01:01 allele comprises SEQ ID NO: 8349.

[0330] In some embodiments, the gNAs specifically target the sequence of an HLA-A locus. In some embodiments, the gNAs that specifically target the sequence of an HLA-A locus comprise a sequence that shares about 90%, about 95%, about 96%, about 97%, about 98%, or about 99% identity to a sequence selected from SEQ ID NOs: 390-3276. In some embodiments, the gNAs that specifically target the sequence of an HLA-A locus comprise a sequence selected from SEQ ID NOs: 390-3276. The sequences disclosed as SEQ ID NOs: 390-3276 include the corresponding genomic sequences, inclusive of the PAM sequence. The skilled artisan will understand that the targeting sequence of the gRNA does not include three 3′ terminal nucleotides of these sequences, which represent the corresponding PAM site for the gRNA.

[0331] In some embodiments, the gNA specifically targets a sequence of HLA-A*02 alleles. For example, the gRNA specifically targets, and hybridize to, a sequence shared by all HLA-A*02 alleles, but that is not shared by HLA-A*02 and HLA-A*03 alleles. In some embodiments, the gNA specifically targets a sequence of HLA-A*02 alleles comprising a sequence that shares about 90%, about 95%, about 96%, about 97%, about 98%, or about 99% identity to a sequence selected from SEQ ID NOs: 390-1585. In some embodiments, the gNA specifically targets a sequence of HLA-A*02 alleles comprising a sequence selected from SEQ ID NOs: 390-1585.

[0332] In some embodiments, the gNA specifically targets a sequence of HLA-A*02:01 alleles. In some embodiments, the gNA specifically targets a sequence of HLA-A*02:01 alleles comprising a sequence that shares about 90%, about 95%, about 96%, about 97%, about 98%, or about 99% identity to a sequence selected from SEQ ID NOs: 390-1174. In some embodiments, the gNA specifically targets a sequence of HLA-A*02:01 alleles comprising a sequence selected from SEQ ID NOs: 390-1174.

[0333] In some embodiments, the gNA specifically targets a sequence of HLA-A*02:01:01 alleles. In some embodiments, the gNA specifically targets a sequence of HLA-A*02:01:01 alleles comprising a sequence that shares about 90%, about 95%, about 96%, about 97%, about 98%, or about 99% identity to a sequence selected from SEQ ID NOs: 390-1166. In some embodiments, the gNA specifically targets a sequence of HLA-A*02:01:01 alleles comprising a sequence selected from SEQ ID NOs: 390-1166.

[0334] In some embodiments, the gNA specifically targets a sequence of HLA-A*02:01:01:01 alleles. In some embodiments, the gNA specifically targets a sequence of HLA-A*02:01:01:01 alleles comprising a sequence that shares about 90%, about 95%, about 96%, about 97%, about 98%, or about 99% identity to a sequence selected from SEQ ID NOs: 390-1126. In some embodiments, the gNA specifically targets a sequence of HLA-A*02:01:01:01 alleles comprising a sequence selected from SEQ ID NOs: 390-1126.

[0335] In some embodiments, the gNA specifically targets a coding DNA sequence of HLA-A*02. In some embodiments, the gNA specifically targets a coding DNA sequence of the HLA-A*02 comprising a sequence that shares about 90%, about 95%, about 96%, about 97%, about 98%, or about 99% identity to a sequence selected from SEQ ID NOs: 390-509. In some embodiments, the gNA specifically targets a coding DNA sequence of the HLA-A*02 comprising a sequence selected from SEQ ID NOs: 390-509.

[0336] In some embodiments, the gNA specifically targets a coding DNA sequence that is shared by more than 1000 HLA-A*02 alleles. In some embodiments, the gNA specifically targets a coding DNA sequence in greater than 1000 HLA-A*02 alleles comprising a sequence that shares about 90%, about 95%, about 96%, about 97%, about 98%, or about 99% identity to a sequence selected from SEQ ID NOs: 390-455. In some embodiments, the gNA specifically targets a coding DNA sequence in greater than 1000 HLA-A*02 alleles comprising a sequence selected from SEQ ID NOs: 390-455.

[0337] In some embodiments, the gNA target sequence comprises a sequence that shares about 90%, about 95%, about 96%, about 97%, about 98%, or about 99% identity to a sequence selected from SEQ ID NOs: 394, 407, 408, 414, 421, 423, 426, 429, 4333, 435, 438, 440, 448, 451, 454. In some embodiments, the gNAs comprise a sequence selected from SEQ ID NOs: 394, 407, 408, 414, 421, 423, 426, 429, 433, 435, 438, 440, 448, 451, and 454.

[0338] In some embodiments, the gNA target comprises a sequence that shares about 90%, about 95%, about 96%, about 97%, about 98%, or about 99% identity to SEQ ID NO: 394. In some embodiments, the gNA target sequence comprises SEQ ID NO: 394.

[0339] In some embodiments, the gNA target sequence comprises a sequence that shares about 90%, about 95%, about 96%, about 97%, about 98%, or about 99% identity to SEQ ID NO: 423. In some embodiments, the gNA target sequence comprises SEQ ID NO: 423.

[0340] In some embodiments, the gNA target sequence comprises a sequence that targets multiple alleles of the HLA-A, B, and C loci. In some embodiments, the gNA target sequence comprises a sequence that shares about 90%, about 95%, about 96%, about 97%, about 98%, or about 99% identity to SEQ ID NO: 408. In some embodiments, the gNA target sequence comprises SEQ ID NO: 408.

[0341] The disclosure provides gNAs comprising a targeting sequence specific to the B2M gene and B2M gene regulatory elements. In some embodiments the gNA comprise a targeting sequence and a gNA scaffold sequence. In some embodiments, the targeting sequence is complementary to a sequence of the B2Mgene. In some embodiments, the B2Mgene comprises a sequence that shares about 90%, about 95%, about 96%, about 97%, about 98%, about 99% identity to SEQ ID NO: 8471. In some embodiments, the B2M gene comprises SEQ ID NO: 8471. Exemplary gRNA sequences targeting B2M are set forth in SEQ ID NOs: 8345, 8350, and 8357-8470.

[0342] In some embodiments, the gNA specifically target a sequence of the B2Mgene. In some embodiments, the gNA comprises a targeting sequence that shares about 80%, about 85%, about 90%, about 95%, about 96%, about 97%, about 98%, or about 99% identity to a sequence selected from SEQ ID NOs: 8357-8470. In some embodiments, the gNA comprises a sequence that shares about 80%, about 85%, about 90%, about 95%, about 96%, about 97%, about 98%, or about 99% identity to a sequence selected from SEQ ID NOs: 8357-8470. In some embodiments, the gNA that specifically targets the sequence of the B2M gene comprise a sequence selected from SEQ ID NOs: 8357-8470.

[0343] In some embodiments, the gNA specifically targets the coding sequence (CDS) sequence of the B2M gene. In some embodiments, the gNA that specifically targets the CDS sequence of the B2Mgene comprise a sequence that shares about 80%, about 85%, about 90%, about 95%, about 96%, about 97%, about 98%, or about 99% identity to a sequence selected from SEQ ID NOs: 8357-8397. In some embodiments, the gNA that specifically targets the sequence of an HLA-A locus comprise a sequence selected from SEQ ID NOs: 8357-8397.

[0344] In some embodiments, the gNA comprises a sequence that targets the B2M gene promoter sequence. In some embodiments, the gNA comprises a sequence that shares about 80%, about 85%, about 90%, about 95%, about 96%, about 97%, about 98%, or about 99% identity to SEQ ID NO: 8398-8470. In some embodiments, the gNA comprises SEQ ID NO: 8398-8470.

[0345] In some embodiments, the gNA comprises a sequence that targets the B2M gene sequence. In some embodiments, the gNA comprises a sequence that shares about 80%, about 85%, about 90%, about 95%, about 96%, about 97%, about 98%, or about 99% identity to SEQ ID NOs: 8357-8365 and 8398-8444. In some embodiments, the gNA comprises SEQ ID NO: 8357-8365 and 8398-8444.

[0346] The illustrative sequences targeting B2M and HLA presented herein may presented as DNA sequences. In these sequences, thymine (T) may be replaced by uracil (U) to arrive at the sequence of the gRNA targeting sequence in those embodiments wherein the gRNA is a gRNA.

### TALEN for Targeted Gene Editing

[0347] In some embodiments, the allogeneic immune cells described herein are edited using TALEN gene editing.

[0348] “TALEN” or “TALEN gene editing” refers to a transcription activator-like effector nuclease, which is an artificial nuclease used to edit a target gene.

[0349] TALENs are produced artificially by fusing a TAL effector DNA binding domain to a DNA cleavage domain. Transcription activator-like effectors (TALEs) can be engineered to bind any desired DNA sequence, including a portion of target genes such as TCR subunits, MHC class I complex components, or CD52. By combining an engineered TALE with a DNA cleavage domain, a restriction enzyme can be produced which is specific to any desired DNA sequence, including a target gene sequence. These can then be introduced into a cell, wherein they can be used for genome editing. Boch (2011) Nature Biotech. 29: 135-6; and Boch et al. (2009) Science 326: 1509-12; Moscou et al. (2009) Science 326: 3501.

[0350] TALEs are proteins secreted by Xanthomonas bacteria. The DNA binding domain contains a repeated, highly conserved 33-34 amino acid sequence, with the exception of the 12th and 13th amino acids. These two positions are highly variable, showing a strong correlation with specific nucleotide recognition. They can thus be engineered to bind to a desired DNA sequence.

[0351] To produce a TALEN, a TALE protein is fused to a nuclease (N), which is a wild-type or mutated Fold endonuclease. Several mutations to FokI have been made for its use in TALENs; these, for example, improve cleavage specificity or activity. Cermak et al. (2011) Nucl. Acids Res. 39: e82; Miller et al. (2011) Nature Biotech. 29: 143-8; Hockemeyer et al. (2011) Nature Biotech. 29: 731-734; Wood et al. (2011) Science 333: 307; Doyon et al. (2010) Nature Methods 8: 74-79; Szczepek et al. (2007) Nature Biotech. 25: 786-793; and Guo et al. (2010) J. Mol. Biol. 200: 96.

[0352] The FokI domain functions as a dimer, requiring two constructs with unique DNA binding domains for sites in the target genome with proper orientation and spacing. Both the number of amino acid residues between the TALE DNA binding domain and the FokI cleavage domain and the number of bases between the two individual TALEN binding sites appear to be important parameters for achieving high levels of activity. Miller et al. (2011) Nature Biotech. 29: 143-8.

[0353] A target gene TALEN can be used inside a cell to produce a double-stranded break (DSB). A mutation can be introduced at the break site if the repair mechanisms improperly repair the break via non-homologous end joining. For example, improper repair may introduce a frame shift mutation. Alternatively, foreign DNA can be introduced into the cell along with the TALEN; depending on the sequences of the foreign DNA and chromosomal sequence, this process can be used to correct a defect in a target gene or introduce such a defect into a wild type target gene, thus decreasing expression of the target gene.

[0354] TALENs specific to sequences in a target gene can be constructed using any method known in the art, including various schemes using modular components. Zhang et al. (2011) Nature Biotech. 29: 149-53; Geibler et al. (2011) PLoS ONE 6: e19509.

### Zinc Finger Nucleases for Targeted Gene Editing

[0355] In some embodiments, a target gene is edited in the allogeneic immune cells described herein using ZFN gene editing.

[0356] “ZFN” or “Zinc Finger Nuclease” or “ZFN gene editing” refer to a zinc finger nuclease, an artificial nuclease which can be used to edit a target gene.

[0357] Like a TALEN, a ZFN comprises a Fold nuclease domain (or derivative thereof) fused to a DNA-binding domain. In the case of a ZFN, the DNA-binding domain comprises one or more zinc fingers. Carroll et al. (2011) Genetics Society of America 188: 773-782; and Kim et al. (1996) Proc. Natl. Acad. Sci. USA 93: 1156-1160.

[0358] A zinc finger is a small protein structural motif stabilized by one or more zinc ions. A zinc finger can comprise, for example, Cys2His2, and can recognize an approximately 3-bp sequence. Various zinc fingers of known specificity can be combined to produce multi-finger polypeptides which recognize about 6, 9, 12, 15 or 18-bp sequences. Various selection and modular assembly techniques are available to generate zinc fingers (and combinations thereof) recognizing specific sequences, including phage display, yeast one-hybrid systems, bacterial one-hybrid and two-hybrid systems, and mammalian cells.

[0359] Like a TALEN, a ZFN must dimerize to cleave DNA. Thus, a pair of ZFNs are required to target non-palindromic DNA sites. The two individual ZFNs must bind opposite strands of the DNA with their nucleases properly spaced apart. Bitinaite et al. (1998) Proc. Natl. Acad. Sci. USA 95: 10570-5.

[0360] Also like a TALEN, a ZFN can create a double-stranded break in the DNA, which can create a frame-shift mutation if improperly repaired, leading to a decrease in the expression and amount of a target gene or gene product in a cell. ZFNs can also be used with homologous recombination to mutate in a target gene.

[0361] ZFNs specific to sequences in a target gene can be constructed using any method known in the art. See, e.g., Provasi (2011) Nature Med. 18: 807-815; Torikai (2013) Blood 122: 1341-1349; Cathomen et al. (2008) Mol. Ther. 16: 1200-7; Guo et al. (2010) J. Mol. Biol. 400: 96; U.S. Patent Publication 2011/0158957; and U.S. Patent Publication 2012/0060230.

### Activators

[0362] The disclosure provides a first ligand, an activator, and a first engineered receptor comprising the first ligand binding domain that binds to the first activator ligand.

[0363] The disclosure provides a first engineered receptor comprising an extracellular region, the extracellular region comprising a first ligand binding domain capable of specifically binding a first ligand that activates or promotes activation of the receptor, which promotes activation of effector cells expressing the receptor. The disclosure further provides a second engineered receptor comprising a second ligand binding domain capable of binding a second ligand, wherein binding of the second ligand by the second ligand binding domain inhibits or reduces activation of effector cells even in the presence of the first receptor bound to the first ligand.

[0364] As used herein, an “activator” or “activator ligand” refers to a first ligand that binds to a first, activator ligand binding domain (LBD) of an engineered receptor of the disclosure, such as a CAR or TCR, thereby mediating activation of a T cell expressing the engineered receptor. The activator is expressed by target cells, for example cancer cells, and may also be expressed more broadly than just the target cells. For example the activator can be expressed on some, or all types of normal, non-target cells.

[0365] In some embodiments, the first ligand is a peptide ligand from any of the activator targets disclosed herein. In some embodiments, the first ligand is a peptide antigen complexed with a major histocompatibility (MHC) class I complex (peptide MHC, or pMHC), for example an MHC complex comprising human leukocyte antigen A*02 allele (HLA-A*02).

[0366] Target cell-specific first activator ligands comprising peptide antigens complexed with pMHC comprising any of human leukocyte antigen (HLA) HLA-A, HLA-B, HLA-C, HLA-E, HLA-F, and HLA-G are envisaged as within the scope of the disclosure. In some embodiments, the first ligand comprises a pMHC comprising HLA-A. HLA-A receptors are heterodimers comprising a heavy α chain and smaller β chain. The α chain is encoded by a variant of HLA-A, while the β chain (β2-microglobulin) is an invariant. There are several thousand HLA-A gene variants, all of which fall within the scope of the instant disclosure. In some embodiments, the MHC-I comprises a human leukocyte antigen A*02 allele (HLA-A*02).

[0367] In some embodiments, the first activator ligand comprises a pMHC comprising HLA-B. Hundreds of versions (alleles) of the HLA-B gene are known, each of which is given a particular number (such as HLA-B*27).

[0368] In some embodiments, the first activator ligand comprises a pMHC comprising HLA-C. HLA-C belongs to the HLA class I heavy chain paralogues. This class I molecule is a heterodimer consisting of a heavy chain and a light chain (beta-2 microglobulin). Over one hundred HLA-C alleles are known in the art.

[0369] In some embodiments, the first activator ligand comprises a pMHC comprising HLA-A. In some embodiments, the first activator ligand comprises a pMHC comprising HLA-B. In some embodiments, the first activator ligand comprises a pMHC comprising HLA-C. In some embodiments, the first activator ligand comprises a pMHC comprising HLA-E. In some embodiments, the first activator ligand comprises a pMHC comprising HLA-F. In some embodiments, the first activator ligand comprises a pMHC comprising HLA-G.

[0370] In some embodiments, the first activator ligand comprises HLA-A. In some embodiments, the first activator ligand comprises HLA-B. In some embodiments, the first activator ligand comprises HLA-C. In some embodiments, the first activator ligand comprises HLA-E. In some embodiments, the first activator ligand comprises HLA-F. In some embodiments, the first activator ligand comprises HLA-G. In some embodiments, the first activator ligand comprises HLA-A, HLA-B, HLA-C, HLA-E, HLA-F or HLA-G.

[0371] In some embodiments, the first, activator ligand binding domain comprises an ScFv domain.

[0372] In some embodiments, the first, activator ligand binding domain comprises a VP-only ligand binding domain.

[0373] In some embodiments, the first, activator ligand binding domain comprises an antigen binding domain isolated or derived from a T cell receptor (TCR). For example, the first, activator ligand binding domain comprises TCR α and β chain variable domains.

[0374] In some embodiments, the first, activator ligand and the second, inhibitor ligand are not the same.

[0375] In some embodiments, the first, activator ligand is expressed by target cells and is not expressed by non-target cells (i.e. normal cells not targeted by the adoptive cell therapy). In some embodiments, the target cells are cancer cells and the non-target cells are non-cancerous cells.

[0376] In some embodiments, the activator ligand has high cell surface expression on the target cells. This high cell surface expression confers the ability to deliver large activation signals. Methods of measuring cell surface expression will be known to the person of ordinary skill in the art and include, but are not limited to, immunohistochemistry using an appropriate antibody against the activator ligand, followed by microscopy or fluorescence activated cell sorting (FACS).

[0377] In some embodiments, the activator ligand is encoded by a gene with an essential cellular function. Essential cellular functions are functions required for a cell to live, and include protein and lipid synthesis, cell division, replication, respiration, metabolism, ion transport, and providing structural support for tissues. Selecting activator ligands encoded by genes with essential cellular functions prevents loss of the activator ligand due to aneuploidy in cancer cells, and makes gene encoding the activator ligand less likely to undergo mutagenesis during the evolution of the cancer. In some embodiments, the activator ligand is encoded by a gene that is haploinsufficient, i.e. loss of copies of the gene encoding the activator ligand are not tolerated by the cell and lead to cell death or a disadvantageous mutant phenotype.

[0378] In some embodiments, the activator ligand is present on all target cells. In some embodiments, the target cells are cancer cells.

[0379] In some embodiments, the activator ligand is present on a plurality of target cells. In some embodiments, the target cells are cancer cells. In some embodiments, the activator ligand is present on at least 50%, at least 60%, at least 70%, at least 80%, at least 85%, at least 90%, at least 95%, at least 96%, at least 97%, at least 98%, at least 99%, at least 99.5% or at least 99.9% of target cells. In some embodiments, the activator ligand is present on at least 95% target cells. In some embodiments, the activator ligand is present on at least 99% target cells.

[0380] In some embodiments, the activator ligand is present on all cells (ubiquitous activator ligands). Activator ligands can be expressed on all cells, if, for example, the second inhibitor ligand is also expressed on all cells except the target cells.

[0381] In some embodiments, the first, activator ligand is expressed by a plurality of target cells and a plurality of non-target cells. In some embodiments, the plurality of non-target cells expresses both the first, activator ligand and the second inhibitor ligand.

[0382] In some embodiments, and the first, activator ligand and second, inhibitor ligand are present on the plurality of non-target target cells at a ratio of about 1:100 to about 100:1 of the first ligand to the second ligand. In some embodiments, and the first, activator ligand and second, inhibitor ligand are present on the plurality of non-target target cells at a ratio of about 1:50 to about 50:1 of the first ligand to the second ligand. In some embodiments, and the first, activator ligand and second, inhibitor ligand are present on the plurality of non-target target cells at a ratio of about 1:25 to about 25:1 of the first ligand to the second ligand. In some embodiments, and the first, activator ligand and second, inhibitor ligand are present on the plurality of non-target target cells at a ratio of about 1:10 to about 10:1 of the first ligand to the second ligand. In some embodiments, and the first, activator ligand and second, inhibitor ligand are present on the plurality of non-target target cells at a ratio of about 1:5 to about 5:1 of the first ligand to the second ligand. In some embodiments, and the first, activator ligand and second, inhibitor ligand are present on the plurality of non-target target cells at a ratio of about 1:3 to about 3:1 of the first ligand to the second ligand. In some embodiments, and the first, activator ligand and second, inhibitor ligand are present on the plurality of non-target target cells at a ratio of about 1:2 to about 2:1 of the first ligand to the second ligand. In some embodiments, and the first, activator ligand and second, inhibitor ligand are present on the plurality of non-target target cells at a ratio of about 1:1.

[0383] The first, activator ligand is recognized by a first ligand binding domain (sometimes referred to herein as the activator LBD).

[0384] Exemplary activator ligands include ligands selected from the group consisting of cell adhesion molecules, cell-cell signaling molecules, extracellular domains, molecule involved in chemotaxis, glycoproteins, G protein-coupled receptors, transmembrane proteins, receptors for neurotransmitters and voltage gated ion channels. In some embodiments, the first, activator ligand is transferrin receptor (TFRC) or a peptide antigen thereof. Human transferrin receptor is described in NCBI record No. AAA61153.1, the contents of which are incorporated herein by reference. In some embodiments, TFRC is encoded by a sequence of SEQ ID NO: 18.

[0385] In some embodiments, the activator ligand is a tumor specific antigen (TSA). In some embodiments, the tumor specific antigen is mesothelin (MSLN), CEA cell adhesion molecule (CEACAMS, or CEA), epidermal growth factor receptor (EGFR) or a peptide antigen thereof. In some embodiments, the TSA is MSLN, CEA, EGFR, delta like canonical Notch ligand 4 (DLL4), mucin 16, cell surface associated (MUC 16 also known as CA125), ganglioside GD2 (GD2), receptor tyrosine kinase like orphan receptor 1 (ROR1), erb-b2 receptor tyrosine kinase 2 (HER2/NEU) or a peptide antigen thereof. Exemplary mouse and humanized scFv antigen binding domains targeting TSAs are set forth in SEQ ID NOs: 83, 85, 87, 89, 91, 93, 95, 97, 99, 101, 103, 105, 107, 109, 111, 113, 115, 273, 275, 266, 268, 277, and 381. Exemplary polynucleotide sequences encoding mouse and humanized scFv antigen binding regions targeting TSA are set forth in SEQ ID NOs: 84, 86, 88, 90, 92, 94, 96, 98, 100, 102, 104, 106, 108, 110, 112, 114, 116, 267, 269, 274, 276, and 278.

[0386] In some embodiments, the activator ligand is MSLN or a peptide antigen thereof, and the activator ligand binding domain comprises a MSLN binding domain. In some embodiments, the MSLN ligand binding domain comprises an scFv domain. In some embodiments, the MSLN ligand binding domain comprises a sequence of SEQ ID NO: 83, SEQ ID NO: 85, SEQ ID NO: 87 or SEQ ID NO: 89. In some embodiments, the MSLN ligand binding domain comprises a sequence at least 90%, at least 95% or at least 99% identical to SEQ ID NO: 83, SEQ ID NO: 85, SEQ ID NO: 87 or SEQ ID NO: 89. In some embodiments, the MSLN ligand binding domain is encoded by a sequence comprising SEQ ID NO: 84, SEQ ID NO: 86, SEQ ID NO: 88 or SEQ ID NO: 90. In some embodiments, the MSLN ligand binding domain is encoded by a sequence having at least 80% identity, at least 85% identity, at least 90% identity, at least 95% identity or at least 99% identity to a sequence of SEQ ID NO: 84, SEQ ID NO: 86, SEQ ID NO: 88 or SEQ ID NO: 90.

[0387] In some embodiments, the activator ligand is CEA or a peptide antigen thereof, and the activator ligand binding domain comprises a CEA binding domain. In some embodiments, the CEA ligand binding domain comprises an ScFv domain. In some embodiments, the CEA ligand binding domain comprises a sequence of SEQ ID NO: 91, SEQ ID NO: 93, SEQ ID NO: 95, SEQ ID NO: 97, SEQ ID NO: 273, SEQ ID NO: 275 or SEQ ID NO: 277. In some embodiments, the CEA ligand binding domain comprises a sequence at least 90%, at least 95% or at least 99% identical to SEQ ID NO: 94, SEQ ID NO: 96, SEQ ID NO: 98, SEQ ID NO: 97, SEQ ID NO: 273, SEQ ID NO: 275 or SEQ ID NO: 277. In some embodiments, the CEA ligand binding domain is encoded by a sequence comprising SEQ ID NO: 92, SEQ ID NO: 94, SEQ ID NO: 96, SEQ ID NO: 98, SEQ ID NO: 274, SEQ ID NO: 276 or SEQ ID NO: 278. In some embodiments, the CEA ligand binding domain is encoded by a sequence having at least 80% identity, at least 85% identity, at least 90% identity, at least 95% identity or at least 99% identity to a sequence of SEQ ID NO: 92, SEQ ID NO: 94, SEQ ID NO: 96, SEQ ID NO: 98, SEQ ID NO: 274, SEQ ID NO: 276 or SEQ ID NO: 278.

[0388] In some embodiments, the activator ligand is CEA or a peptide antigen thereof, and the activator ligand binding domain comprises a CEA binding domain. In some embodiments, the CEA ligand binding domain comprises a CDR-H1 of EFGMN (SEQ ID NO: 285), a CDR-H2 of WINTKTGEATYVEEFKG (SEQ ID NO: 286), a CDR-H3 of WDFAYYVEAMDY (SEQ ID NO: 287) or WDFAHYFQTMDY (SEQ ID NO: 288), a CDR-L1 of KASQNVGTNVA (SEQ ID NO: 289) or KASAAVGTYVA (SEQ ID NO: 290), a CDR-L2 of SASYRYS (SEQ ID NO: 291) or SASYRKR (SEQ ID NO: 292), and a CDR-L3 of HQYYTYPLFT (SEQ ID NO: 293) or sequences having at least 85% or at least 95% identity thereto. In some embodiments, a CEA ScFv comprises a CDR-H1 of EFGMN (SEQ ID NO: 285), a CDR-H2 of WINTKTGEATYVEEFKG (SEQ ID NO: 286), a CDR-H3 of WDFAYYVEAMDY (SEQ ID NO: 287) or WDFAHYFQTMDY (SEQ ID NO: 288), a CDR-L1 of KASQNVGTNVA (SEQ ID NO: 289) or KASAAVGTYVA (SEQ ID NO: 290), a CDR-L2 of SASYRYS (SEQ ID NO: 291) or SASYRKR (SEQ ID NO: 292) and a CDR-L3 of HQYYTYPLFT (SEQ ID NO: 293). In some embodiments, a CEA binding domain comprises a CDR-H1 of EFGMN (SEQ ID NO: 285), a CDR-H2 of WINTKTGEATYVEEFKG (SEQ ID NO: 286), a CDR-H3 of WDFAYYVEAMDY (SEQ ID NO: 287), a CDR-L1 of KASQNVGTNVA (SEQ ID NO: 289), a CDR-L2 of SASYRYS (SEQ ID NO: 290) and a CDR-L3 of HQYYTYPLFT (SEQ ID NO: 293). In some embodiments, a CEA ScFv comprises a CDR-H1 of EFGMN (SEQ ID NO: 285), a CDR-H2 of WINTKTGEATYVEEFKG (SEQ ID NO: 286), a CDR-H3 of WDFAYYVEAMDY (SEQ ID NO: 287), a CDR-L1 of KASAAVGTYVA (SEQ ID NO: 290), a CDR-L2 of SASYRKR, and a CDR-L3 of HQYYTYPLFT (SEQ ID NO: 293). In some embodiments, a CEA binding domain comprises a CDR-H1 of EFGMN (SEQ ID NO: 285), a CDR-H2 of WINTKTGEATYVEEFKG (SEQ IDNO: 286), a CDR-H3 of WDFAHYFQTMDY (SEQ ID NO: 288), a CDR-L1 of KASAAVGTYVA (SEQ ID NO: 290), a CDR-L2 of SASYRKR, and a CDR-L3 of HQYYTYPLFT (SEQ ID NO: 293).

[0389] In some embodiments, the activator ligand is CEA or a peptide antigen thereof, and the activator receptor is a CEA CAR. In some embodiments, the CEA CAR comprises sequence at least 90%, at least 95% or at least 99% identical to SEQ ID NO: 279, SEQ ID NO: 281 or SEQ ID NO: 283. In some embodiments, the CEA CAR comprises or consists essentially of SEQ ID NO: 279, SEQ ID NO: 281 or SEQ ID NO: 283. In some embodiments, the CEA CAR is encoded by a sequence comprising or consisting essentially of SEQ ID NO: 280, SEQ ID NO: 282 or SEQ ID NO: 284. In some embodiments, the CEA CAR is encoded by a sequence having at least 80% identity, at least 85% identity, at least 90% identity, at least 95% identity or at least 99% identity to SEQ ID NO: 280, SEQ ID NO: 282 or SEQ ID NO: 284.

[0390] In some embodiments, the activator ligand is EGFR or a peptide antigen thereof, and the activator ligand binding domain comprises an EGFR binding domain. In some embodiments, the EGFR ligand binding domain comprises an ScFv domain. In some embodiments, the EGFR ligand binding domain comprises a sequence of SEQ ID NO: 99, SEQ ID NO: 101, SEQ ID NO: 103, SEQ ID NO: 105, SEQ ID NO: 107, SEQ ID NO: 109, SEQ ID NO: 111, SEQ ID NO: 113, SEQ ID NO: 115 or SEQ ID NO: 381. In some embodiments, the EGFR ligand binding domain comprises a sequence at least 90%, at least 95% or at least 99% identical to SEQ ID NO: 99, SEQ ID NO: 101, SEQ ID NO: 103, SEQ ID NO: 105, SEQ ID NO: 107, SEQ ID NO: 109, SEQ ID NO: 111, SEQ ID NO: 113, SEQ ID NO: 115 or SEQ ID NO: 381. In some embodiments, the EGFR ligand binding domain is encoded by a sequence comprising SEQ ID NO: 100, SEQ ID NO: 101, SEQ ID NO: 104, SEQ ID NO: 106, SEQ ID NO: 108, SEQ ID NO: 110, SEQ ID NO: 112, SEQ ID NO: 114 or SEQ ID NO: 116. In some embodiments, the EGFR ligand binding domain is encoded by a sequence having at least 80% identity, at least 85% identity, at least 90% identity, at least 95% identity or at least 99% identity to a sequence of SEQ ID NO: 100, SEQ ID NO: 101, SEQ ID NO: 104, SEQ ID NO: 106, SEQ ID NO: 108, SEQ ID NO: 110, SEQ ID NO: 112, SEQ ID NO: 114 or SEQ ID NO: 116.

[0391] In some embodiments, the activator ligand is EGFR or a peptide antigen thereof, and the activator ligand binding domain comprises an EGFR ligand binding domain. In some embodiments, the EGFR ligand binding domain comprises a VH domain selected from the group consisting of SEQ ID NO: 117, SEQ ID NO: 119, SEQ ID NO: 121, SEQ ID NO: 123, SEQ ID NO: 125 and SEQ ID NO: 127. In some embodiments, the EGFR ligand binding domain comprises a VH selected from the group consisting of SEQ ID NO: 117, SEQ ID NO: 119, SEQ ID NO: 121, SEQ ID NO: 123, SEQ ID NO: 125 and SEQ ID NO: 127 or a sequence having at least 90%, at least 95% or at least 99% identity thereto. In some embodiments, the EGFR ligand binding domain comprises a VL domain selected from the group consisting of SEQ ID NO: 118, SEQ ID NO: 120, SEQ ID NO: 122, SEQ ID NO: 124, SEQ ID NO: 126 and SEQ ID NO: 128. In some embodiments, the EGFR ligand binding domain comprises a VH selected from the group consisting of SEQ ID NO: 118, SEQ ID NO: 120, SEQ ID NO: 122, SEQ ID NO: 124, SEQ ID NO: 126 and SEQ ID NO: 128 or a sequence having at least 90%, at least 95% or at least 99% identity thereto.

[0392] In some embodiments, the activator ligand is EGFR or a peptide antigen thereof, and the activator ligand binding domain is an EGFR ligand binding domain. In some embodiments, the EGFR ligand binding domain comprises CDRs selected from SEQ ID NOs: 129-162. In some embodiments, the EGFR ligand binding domain comprises a heavy chain CDR 1 (CDR H1) selected from the group consisting of SEQ ID NOs: 129-134. In some embodiments, the EGFR ligand binding domain comprises a heavy chain CDR 2 (CDR H2) selected from the group consisting of SEQ ID NOs: 135-140. In some embodiments, the EGFR ligand binding domain comprises a heavy chain CDR 3 (CDR H3) selected from the group consisting of SEQ ID NOs: 141-146. In some embodiments, the EGFR ligand binding domain comprises a light chain CDR 1 (CDR L1) selected from the group consisting of SEQ ID NOs: 147-151. In some embodiments, the EGFR ligand binding domain comprises a light chain CDR 2 (CDR L2) selected from the group consisting of SEQ ID NOs: 152-156. In some embodiments, the EGFR ligand binding domain comprises a light chain CDR 3 (CDR L3) selected from the group consisting of SEQ ID NOs: 157-162. In some embodiments, the EGFR ligand binding domain comprises a CDR H1 selected from SEQ ID NOs: 129-134, a CDR H2 selected from SEQ ID NOs: 135-140, a CDR H3 selected from SEQ ID NOs: 141-146, a CDR L1 selected from SEQ ID NOs: 147-151, a CDR L2 selected from SEQ ID NOs: 152-156, and a CDR L3 selected from SEQ ID NOs: 152-156.

[0393] In some embodiments, the activator ligand is mesothelin (MSLN) or a peptide antigen thereof, and the activator ligand binding domain is an mesothelin ligand binding domain. Examples of mesothelin ligand binding domains are described, for example, in International Patent Application No. PCT/US2021/046751 which is incorporated herein in its entirety for examples of mesothelin ligand binging domains that may be used in the compositions and methods described herein. In some embodiments, the mesothelin ligand binding domain comprises an scFv. In some embodiments the mesothelin ligand binding domain is an scFv comprising a sequence that is least 90%, at least 95%, at least 98%, or at least 99% identical to the sequence set forth in any one of SEQ ID NOs: 21510-21572. In some embodiments the mesothelin ligand binding domain is an scFv comprising the sequence set forth in any one of SEQ ID NOs: 21510-21572.

[0394] In some embodiments, the mesothelin ligand binding domain comprises a VH CDR 1 selected from the group consisting of SEQ ID NOs: 21573-21593. In some embodiments, the mesothelin ligand binding domain comprises a VH CDR2 selected from the group consisting of SEQ ID NOs: 21594-21614. In some embodiments, the mesothelin ligand binding domain comprises a VH CDR3 selected from the group consisting of SEQ ID NOs: 21615-21678. In some embodiments, the mesothelin ligand binding domain comprises a VL CDR1 selected from the group consisting of SEQ ID NOs: 21679-21683. In some embodiments, the mesothelin ligand binding domain comprises a VL CDR2 selected from the group consisting of SEQ ID NOs: 152, 21684 and 21685. In some embodiments, the mesothelin ligand binding domain comprises a VL CDR3 selected from the group consisting of SEQ ID NOs: 157, 21686, 21687, and 21688.

[0395] In some embodiments, the mesothelin ligand binding domain comprises a VH CDR 1 selected from the group consisting of SEQ ID NOs: 21573-21593; a VH CDR2 selected from the group consisting of SEQ ID NOs: 21594-21614; a VH CDR3 selected from the group consisting of SEQ ID NOs: 21615-21678; a VL CDR1 selected from the group consisting of SEQ ID NOs: 21679-21683; a VL CDR2 selected from the group consisting of SEQ ID NOs: 152, 21684 and 21685; and a VL CDR3 selected from the group consisting of SEQ ID NOs: 157, 21686, 21687, and 21688.

[0396] In some embodiments, the activator ligand is a pan-HLA ligand, and the activator binding domain is a pan-HLA binding domain, i.e. a binding domain that binds to and recognizes an antigenic determinant shared among products of the HLA A, B and C loci. Various single variable domains known in the art or disclosed herein are suitable for use in embodiments. Such scFvs include, for example and without limitation, the following mouse and humanized pan-HLA scFv antibodies. An exemplary pan-HLA ligand is W6/32, which recognizes a conformational epitope, reacting with HLA class I alpha3 and alpha2 domains. Illustrative pan-HLA scFv binding domains derived from W6/32 are set forth in SEQ ID NOs: 163, 165, 167, 169, 171, and 173. Illustrative polynucleotide sequences encoding an-HLA scFv binding domains derived from W6/32 are set forth in SEQ ID NOs: 164, 166, 168, 170, 172, and 174.

[0397] In some embodiments, the activator ligand is pan-HLA ligand, and the activator ligand binding domain comprises a pan-HLA ligand binding domain. In some embodiments, the pan-HLA ligand binding domain comprises an ScFv domain. In some embodiments, the pan-HLA ligand binding domain comprises a sequence of SEQ ID NO: 163, SEQ ID NO: 165, SEQ ID NO: 167, SEQ ID NO: 169, SEQ ID NO: 171, or SEQ ID NO: 173. In some embodiments, the pan-HLA ligand binding domain comprises a sequence at least 90%, at least 95% or at least 99% identical to SEQ ID NO: 163, SEQ ID NO: 165, SEQ ID NO: 167, SEQ ID NO: 169, SEQ ID NO: 171, or SEQ ID NO: 173. In some embodiments, the pan-HLA ligand binding domain is encoded by a sequence comprising SEQ ID NO: 164, SEQ ID NO: 166, SEQ ID NO: 168, SEQ ID NO: 170, SEQ ID NO: 172, or SEQ ID NO: 174. In some embodiments, the pan-HLA ligand binding domain is encoded by a sequence having at least 80% identity, at least 85% identity, at least 90% identity, at least 95% identity or at least 99% identity to a sequence of SEQ ID NO: 164, SEQ ID NO: 166, SEQ ID NO: 168, SEQ ID NO: 170, SEQ ID NO: 172, or SEQ ID NO: 174.

[0398] In some embodiments, the activator ligand is CD19 molecule (CD19) or a peptide antigen thereof, and the activator ligand binding domain comprises a CD19 ligand binding domain. In some embodiments, the CD19 ligand binding domain comprises an ScFv domain. In some embodiments, the CD19 ligand binding domain comprises a sequence at least 90%, at least 95% or at least 99% identical to SEQ ID NO: 266 or SEQ ID NO: 268. In some embodiments, the CD-19 ligand binding domain comprises a sequence of SEQ ID NO: 266 or SEQ ID NO: 268. In some embodiments, the CD19 ligand binding domain is encoded by a sequence comprising SEQ ID NO: 267, or SEQ ID NO: 269. In some embodiments, the CD19 ligand binding domain is encoded by a sequence having at least 80% identity, at least 85% identity, at least 90% identity, at least 95% identity or at least 99% identity to a sequence of SEQ ID NO: 267 or SEQ ID NO: 269.

[0399] In some embodiments, activator ligand is CD19 molecule (CD19) or a peptide antigen thereof, and the activator receptor is a CAR. In some embodiments, the CD19 CAR comprises a sequence at least 90%, at least 95% or at least 99% identical to SEQ ID NO: 270 or SEQ ID NO: 272. In some embodiments, the CD19 CAR comprises or consists essentially of SEQ ID NO: 270 or SEQ ID NO: 272. In some embodiments, the CD19 CAR is encoded by a sequence having at least 80% identity, at least 85% identity, at least 90% identity, at least 95% identity or at least 99% identity to a sequence of SEQ ID NO: 271 or SEQ ID NO: 380. In some embodiments, the CD19 CAR is encoded by a sequence comprising or consisting essentially of SEQ ID NO: 271 or SEQ ID NO: 380. It will be appreciated by the person of ordinary skill that first, activator ligand binding domains for the first receptor may be isolated or derived from any source known in the art, including, but not limited to, art recognized T cell receptors, chimeric antigen receptors and antibody binding domains. For example, the first ligand binding domain may be derived from any of the antibodies disclosed in Table 1, and bind to a first ligand selected from the antigens described in Table 1. Accordingly, the immune cells comprising the two receptor system described can be used to treat any of the diseases or disorders described in Table 1. Selection of an appropriate first, activator receptor ligand binding domain to treat any the cancers described herein will be apparent to those of skill in the art.

TABLE 1
Exemplary Antibodies

| | | Exemplary Diseases and |
|---|---|---|
| Antigen | Antibody | Disorders |
| TNF receptor superfamily | Urelumab, Utomilumab | cancer, diffuse large B- |
| member 9 (4-1BB, CD137) | | cell lymphoma |
| 5′-nucleotidase | Oleclumab | pancreatic and colorectal |
| | | cancer |
| trophoblast glycoprotein | Naptumomab | non-small cell lung |
| (5T4) | | carcinoma, renal cell |
| | | carcinoma |
| activin receptor-like kinase 1 | Ascrinvacumab | cancer |
| alpha-fetoprotein | Tacatuzumab | cancer |
| angiopoietin 2 | Nesvacumab, Vanucizumab | cancer |
| TNF superfamily member | Belimumab, Tabalumab, | cancers and autoimmune |
| 13b (BAFF) | Tibulizumab | disorders |
| TNF receptor superfamily | Belantamab | multiple myeloma |
| member 17 (BCMA) | | |
| mucin 16, cell surface | Igovomab, Oregovomab, | ovarian cancer |
| associated (CA-125) | Sofituzumab | |
| C-C motif chemokine | Mogamulizumab | adult T-cell |
| receptor 4 (CCR4) | | leukemia/lymphoma |
| interleukin 3 receptor | Talacotuzumab | leukemia |
| subunit alpha (CD123) | | |
| TNF receptor superfamily | Tavolimab, Vonlerolizumab | cancer |
| member 4 (CD134) | | |
| cytotoxic T-lymphocyte | Ipilimumab | melanoma |
| associated protein 4 | | |
| (CD152) | | |
| CD19 molecule (CD19) | Duvortuxizumab, Blinatumomab, | cancer |
| | Coltuximab, Denintuzumab, | |
| | Inebilizumab, Loncastuximab, | |
| | Taplitumomab | |
| membrane spanning 4- | Ibritumomab, Obinutuzumab, | cancers, multiple |
| domains Al (CD20) | Ocaratuzumab, Ocrelizumab, | sclerosis, autoimmune |
| | Ofatumumab, Rituximab, | disorders |
| | Tositumomab, Veltuzumab | |
| CD200 molecule (CD200) | Samalizumab | cancer |
| CD22 molecule (CD22) | Bectumomab, Epratuzumab, | cancer |
| | Inotuzumab, Moxetumomab, | |
| | Pinatuzumab | |
| Fc fragment of IgE | Gomiliximab, Lumiliximab | chronic lymphocytic |
| receptor II (CD23, IgE | | leukemia |
| receptor) | | |
| interleukin 2 receptor | Camidanlumab, Basiliximab, | leukemias and lymphomas |
| subunit alpha (CD25) | Inolimomab, Daclizumab | |
| CD27 molecule (CD27) | Varlilumab | solid tumors and |
| | | hematologic malignancies |
| CD276 molecule (CD276) | Enoblituzumab, Omburtamab | cancer |
| TNF receptor superfamily | Brentuximab, Iratumumab | Hodgkin's lymphoma |
| member 8 (CD30, | | |
| TNFRSF8) | | |
| CD33 molecule (CD33) | Gemtuzumab, Lintuzumab, | acute myelogenous |
| | Vadastuximab | leukemia |
| CD37 molecule (CD37) | Lilotomab, Otlertuzumab, | cancer |
| | Tetulomab | |
| CD38 molecule (CD38) | Daratumumab, Isatuximab | multiple myeloma |
| CD44 molecule v6 (CD44 | Bivatuzumab | squamous cell carcinoma |
| v6) | | |
| integrin subunit alpha V | Abituzumab, Intetumumab | cancer |
| (CD51) | | |
| neural cell adhesion | Lorvotuzumab | cancer |
| molecule 1 (CD56) | | |
| CD6 molecule (CD6) | Itolizumab | psoriasis |
| CD70 molecule (CD70) | Cusatuzumab, Vorsetuzumab | cancer |
| CD74 molecule (CD74) | Milatuzumab | hematological |
| | | malignancies |
| CD79B molecule (CD79B) | Polatuzumab, Iladatuzumab | Hematological cancers |
| CD80 molecule (CD80) | Galiximab | B-cell lymphoma |
| CEA cell adhesion | Altumomab, Arcitumomab, | cancer, colorectal cancer |
| molecule 5 (CEA) | Labetuzumab, Cibisatamab | |
| Claudin 18 Isoform 2 | Zolbetuximab | gastric cancer |
| Colony stimulating factor 1 | Lacnotuzumab | cancer |
| (CSF1) | | |
| colony stimulating factor 1 | Cabiralizumab, Emactuzumab | cancer |
| receptor (CSF1R) | | |
| Colony stimulating factor 2 | Gimsilumab,Lenzilumab, Otilimab, | leukemias |
| (CSF2) | Mavrilimumab | |
| cytotoxic T-lymphocyte | Tremelimumab | non-small cell lung, head |
| associated protein 4 | | & neck, urothelial cancer |
| (CTLA-4) | | |
| CXCR4 (CD184) | Ulocuplumab | hematologic malignancies |
| dendritic cell-associated | Tepoditamab | cancer |
| lectin 2 | | |
| delta like canonical Notch | Rovalpituzumab | small cell lung cancer |
| ligand 3 (DLL3) | | |
| delta like canonical Notch | Demcizumab | cancer |
| ligand 4 (DLL4) | | |
| TNF receptor superfamily | Drozitumab | cancer |
| member 10b (DR5) | | |
| EGF like domain multiple | Parsatuzumab | cancer |
| 7 (EGFL7) | | |
| epidermal growth factor | Cetuximab, Depatuxizumab, | cancer |
| receptor (EGFR) | Futuximab, Imgatuzumab, | |
| | Laprituximab, Matuzumab, | |
| | Necitumumab, Nimotuzumab, | |
| | Panitumumab, Zalutumumab, | |
| | Modotuximab, Amivantamab, | |
| | Tomuzotuximab, Losatuxizumab | |
| epithelial cell adhesion | Adecatumumab, Citatuzumab, | cancer |
| molecule (EpCAM) | Edrecolomab, Oportuzumab, | |
| | Solitomab, Tucotuzumab, | |
| | Catumaxomab | |
| EPH receptor A3 (EPHA3) | Ifabotuzumab | glioblastoma multiforme |
| erb-b2 receptor tyrosine | Duligotuzumab, Elgemtumab, | cancer |
| kinase 3 (ERBB3, HER3) | Lumretuzumab, Patritumab, | |
| | Seribantumab, Zenocutuzumab | |
| fibroblast growth factor | Aprutumab, Bemarituzumab | cancer |
| receptor (FGFR2) | | |
| Frizzled receptor | Vantictumab | cancer |
| GD2 ganglioside | Dinutuximab | neuroblastoma |
| GD3 ganglioside | Ecromeximab | malignant melanoma |
| GD3 ganglioside | Mitumomab | small cell lung carcinoma |
| glypican 3 | Codrituzumab | cancer |
| glycoprotein nmb | Glembatumumab | melanoma, breast cancer |
| (GPNMB) | | |
| epidermal growth factor | Zatuximab | cancer |
| receptor (HER1) | | |
| erb-b2 receptor tyrosine | Ertumaxomab, Margetuximab, | cancer, breast cancer |
| kinase 2 (HER2) | Timigutuzumab, Gancotamab, | |
| | Pertuzumab, Trastuzumab | |
| hepatocyte growth factor | Ficlatuzumab, Rilotumumab | cancer |
| (HGF) | | |
| MET proto-oncogene, | Telisotuzumab, Emibetuzumab | cancer |
| receptor tyrosine kinase | | |
| (HGFR) | | |
| IGF-1 receptor (CD221) | Cixutumumab, Dalotuzumab, | cancer |
| | Figitumumab, Ganitumab, | |
| | Robatumumab, Teprotumumab | |
| Interleukin 3 receptor | Flotetuzumab | hematological |
| | | malignancies |
| Interleukin 1 alpha (IL1A) | Bermekimab | colorectal cancer |
| Interleukin 2 (IL2) | Cergutuzumab | cancer |
| integrin a5ß1 | Volociximab | solid tumors |
| integrin avß3 | Etaracizumab | melanoma, prostate |
| | | cancer, ovarian cancer |
| lymphocyte activating 3 | Relatlimab | melanoma |
| (LAG3) | | |
| C-C motif chemokine | Carlumab | cancer |
| ligand 2 (MCP-1) | | |
| mesothelin | Amatuximab | cancer |
| Mucin 1 | Clivatuzumab, Gatipotuzumab, | cancer |
| | Pemtumomab, Cantuzumab, | |
| | Pankomab | |
| NGNA ganglioside | Racotumomab | non-small cell lung cancer |
| Notch 1 | Brontictuzumab | cancer |
| Notch receptor | Tarextumab | cancer |
| neuropilin 1 (NRP1) | Vesencumab | cancer |
| programmed cell death 1 | Camrelizumab, Cetrelimab, | cancer |
| (PD-1) | Nivolumab,Pembrolizumab, | |
| | Pidilizumab, Cemiplimab, | |
| | Spartalizumab | |
| CD274 molecule (PD-L1) | Atezolizumab, Avelumab, | cancer |
| | Durvalumab | |
| receptor tyrosine kinase | Cirmtuzumab | leukemia |
| like orphan receptor 1 | | |
| (ROR1) | | |
| tenascin C | Tenatumomab | cancer |
| transforming growth factor | Fresolimumab | cancer |
| beta 1 (TGF-ß) | | |
| VEGF-A | Brolucizumab, Bevacizumab, | cancer |
| | Ranibizumab, Varisacumab, | |
| | Faricimab | |
| VEGFR-1 | Icrucumab | cancer |
| VEGFR2 | Alacizumab, Ramucirumab | cancer |

### Inhibitors

[0400] The disclosure provides a second ligand, an inhibitor, and a second engineered receptor comprising a second ligand binding domain that binds to the inhibitor ligand.

[0401] The disclosure provides a second engineered receptor comprising an extracellular region, the extracellular region comprising a second ligand binding domain capable of specifically binding to a second ligand that inhibits activation of effector cells expressing the first and second receptors, wherein the effector cells are activated by binding of the first ligand to the first engineered receptor.

[0402] As used herein an “inhibitor” or “inhibitor ligand,” sometimes called a “blocker,” refers to a second ligand that binds to a second, ligand binding domain (inhibitor LBD) of an engineered receptor of the disclosure, but inhibits activation of an immune cell expressing the engineered receptor. The inhibitor is not expressed by the target cells. The inhibitor ligand is also expressed in a plurality of normal, non-target cells, including normal, non-target cells that express the activator ligand, thereby protecting these cells from the cytotoxic effects of the adoptive cell therapy. Without wishing to be bound by theory, inhibitor ligands can block activation of the effector cells through a variety of mechanisms. For example, binding of the inhibitor ligand to the inhibitor LBD can block transmission of a signal that occurs upon binding of the activator ligand to the activator LBD that would, in the absence of the inhibitor, lead to activation of the immune cell expressing the engineered receptors described herein.

[0403] Alternatively, or in addition, binding of the inhibitor ligand to the second engineered receptor can cause loss of cell surface expression the first, activator receptor from the surface of the immune cells comprising the two receptor system described herein. Without wishing to be bound by theory, it is thought that immune cell engagement of activator and inhibitor ligands on normal cells causes the inhibitor receptor to cause removal of nearby activator receptor molecules from the immune cell surface. This process locally desensitizes the immune cell, reversibly raising its activation threshold. Immune cells that engage only the activator ligand on a target cell cause local activation signals which are unimpeded by signals from the second, inhibitory receptor. This local activation increases until release of cytotoxic granules leads to target cell selective cell death. However, modulation of surface receptor expression levels may not be the only mechanism by which blocker receptors inhibit activation of immune cells by the first activator receptor. Without wishing to be bound by theory, other mechanisms may come into play, including, but not limited to, cross-talk between activator and blocker receptor signaling pathways.

[0404] In some embodiments, the second ligand is not expressed by the target cells, and is expressed by the non-target cells. In some embodiments, the target cells are cancer cells and the non-target cells are non-cancerous cells.

[0405] In some embodiments, the second, inhibitor ligand binding domain comprises an ScFv domain.

[0406] In some embodiments, the second, inhibitor ligand binding domain comprises a VP-only ligand binding domain.

[0407] In some embodiments, the second, inhibitor ligand binding domain comprises an antigen binding domain isolated or derived from a T cell receptor (TCR). For example, the second, inhibitor ligand binding domain comprises TCR α and β chain variable domains.

### Inhibitor Targets

[0408] In some embodiments, the inhibitor ligand comprises a gene with high, homogeneous surface expression across tissues, or a peptide antigen thereof. Without wishing to be bound by theory, high, homogeneous surface expression across tissues allows the inhibitor ligand to deliver a large, even inhibitory signal. Alternatively, or in addition, expression of activator and inhibitor targets may be correlated, i.e. the two are expressed at similar levels on non-target cells.

[0409] In some embodiments, the second, inhibitor ligand is a peptide ligand. In some embodiments, the second, inhibitor ligand is a peptide antigen complexed with a major histocompatibility (MHC) class I complex (peptide MHC, or pMHC). Inhibitor ligands comprising peptide antigens complexed with pMHC comprising any of HLA-A, HLA-B or HLA-C are envisaged as within the scope of the disclosure.

[0410] In some embodiment, the inhibitor ligand is encoded by a gene that is absent or polymorphic in many tumors.

[0411] Methods of distinguishing the differential expression of inhibitor ligands between target and non-target cells will be readily apparent to the person or ordinary skill in the art. For example, the presence or absence of inhibitor ligands in non-target and target cells can be assayed by immunohistochemistry with an antibody that binds to the inhibitor ligand, followed by microscopy or FACS, RNA expression profiling of target cells and non-target cells, or DNA sequencing of non-target and target cells to determine if the genomic locus of the inhibitor ligand comprises mutations in either the target or non-target cells.

### Alleles Lost Due to Loss of Heterozygosity (LOH)

[0412] Homozygous deletions in primary tumors are rare and small, and therefore unlikely to yield target B candidates. For example, in an analysis of 2218 primary tumors across 21 human cancer types, the top four candidates were cyclin dependent kinase inhibitor 2A (CDKN2A), RB transcriptional corepressor 1 (RBI), phosphatase and tensin homolog (PTEN) and N3PB2. However, CDKN2A (P16) was deleted in only 5% homozygous deletion across all cancers. Homozygous HLA-A deletions were found in less than 0.2% of cancers (Cheng et al., Nature Comm. 8:1221 (2017)). In contrast, deletion of a single copy of a gene in cancer cells due to loss of hemizygosity occurs far more frequently.

[0413] In some embodiments, the second, inhibitor ligand comprises an allele of a gene that is lost in target cells due to loss of heterozygosity. In some embodiments, the target cells comprises cancer cells. Cancer cells undergo frequent genome rearrangements, including duplication and deletions. These deletions can lead to the deletion of one copy of one or more genes in the cancer cells.

[0414] As used herein, “loss of heterozygosity (LOH)” refers to a genetic change that occurs at high frequency in cancers, whereby one of the two alleles is deleted, leaving a single mono-allelic (hemizygous) locus.

### HLA Class I Alleles

[0415] In some embodiments, the second, inhibitor ligand comprises an HLA class I allele. The major histocompatibility complex (MHC) class I is a protein complex that displays antigens to cells of the immune system, triggering immune response. The Human Leukocyte Antigens (HLAs) corresponding to MHC class I are HLA-A, HLA-B and HLA-C.

[0416] In some embodiments, the second, inhibitor ligand comprises an HLA class I allele. In some embodiments, the second, inhibitor ligand comprises an allele of HLA class I that is lost in a target cell through LOH. HLA-A is a group of human leukocyte antigens (HLA) of the major histocompatibility complex (MHC) that are encoded by the HLA-A locus. HLA-A is one of three major types of human MHC class I cell surface receptors. The receptor is a heterodimer comprising a heavy α chain and smaller β chain. The α chain is encoded by a variant of HLA-A, while the β chain (β2-microglobulin) is invariant. There are several thousand HLA-A variants, all of which fall within the scope of the instant disclosure.

[0417] In some embodiments, the second, inhibitor ligand comprises an HLA-B allele. The HLA-B gene has many possible variations (alleles). Hundreds of versions (alleles) of the HLA-B gene are known, each of which is given a particular number (such as HLA-B27).

[0418] In some embodiments, the second, inhibitor ligand comprises an HLA-C allele. HLA-C belongs to the HLA class I heavy chain paralogues. This class I molecule is a heterodimer consisting of a heavy chain and a light chain (beta-2 microglobulin). Over one hundred HLA-C alleles have been described.

[0419] In some embodiments, the HLA class I allele has broad or ubiquitous RNA expression.

[0420] In some embodiments, the HLA class I allele has a known, or generally high minor allele frequency.

[0421] In some embodiments, the HLA class I allele does not require a peptide-MHC antigen, for example when the HLA class I allele is recognized by a pan-HLA ligand binding domain.

[0422] In some embodiments, the second inhibitor ligand comprises an HLA-A allele. In some embodiments the HLA-A allele comprises HLA-A*02. Various single variable domains known in the art or disclosed herein that bind to and recognize HLA-A*02 are suitable for use in embodiments. Such scFvs include, for example and without limitation, the following mouse and humanized scFv that bind HLA-A*02 in a peptide-independent which are set forth in SEQ ID NOs: 50-61. Illustrative polynucleotide sequences encoding scFvs that bind HLA-A*02 are set forth in SEQ ID NOs: 175-186.

[0423] In some embodiments, the scFv comprises the complementarity determined regions (CDRs) of any one of SEQ ID NOS: 39-49. In some embodiments, the scFv comprises a sequence at least 95% identical to any one of SEQ ID NOS: 39-49. In some embodiments, the scFv comprises a sequence identical to any one of SEQ ID NOS: 39-49. In some embodiments, the heavy chain of the antibody or scFv comprises the heavy chain CDRs of any one of SEQ ID NOS: 50-61, and wherein the light chain of the antibody or scFv comprises the light chain CDRs of any one of SEQ ID NOS: 50-61. In some embodiments, the heavy chain of the antibody or scFv comprises a sequence at least 95% identical to the heavy chain portion of any one of SEQ ID NOS: 50-61, and wherein the light chain of the antibody or scFv comprises a sequence at least 95% identical to the light chain portion of any one of SEQ ID NOS: 50-61.

[0424] In some embodiments, the heavy chain of the antibody or scFv comprises a sequence identical to the heavy chain portion of any one of SEQ ID NOS: 50-61, and wherein the light chain of the antibody or scFv comprises a sequence identical to the light chain portion of any one of SEQ ID NOS: 50-61.

[0425] In some embodiments, the scFv comprises a sequence at least 95% identical, at least 96% identical, at least 97% identical, at least 98% identical, at least 99% identical or identical to any one of SEQ ID NOS: 50-61.

[0426] In some embodiments, the second, inhibitory ligand is HLA-A*02, and the inhibitory ligand binding domain comprises an HLA-A*02 ligand binding domain. In some embodiments, the second ligand binding domain binds HLA-A*02 independent of the peptide in a pMHC complex comprising HLA-A*02. In some embodiments, the HLA-A*02 ligand binding domain comprises an ScFv domain. In some embodiments, the HLA-A*02 ligand binding domain comprises a sequence of any one of SEQ ID NOs: 50-61. In some embodiments, the HLA-A*02 ligand binding domain comprises a sequence at least 90%, at least 95% or at least 99% identical to a sequence of any one of SEQ ID NOs: 50-61. In some embodiments, the HLA-A*02 ligand binding domain is encoded by a sequence comprising any one of SEQ ID NOs: 175-186. In some embodiments, the HLA-A*02 ligand binding domain is encoded by a sequence having at least 80% identity, at least 85% identity, at least 90% identity, at least 95% identity or at least 99% identity to a sequence of any one of SEQ ID NOs: 175-186.

[0427] In some embodiments, the non-target antigen comprises HLA-A*01, and the ligand binding domain of the second receptor comprises an HLA-A*01 ligand binding domain. Exemplary HLA-A*01 ligand binding domains are described in International Patent Application No. PCT/US2021/046733, which is incorporated herein by reference in its entirety for examples of sequences of HLA-A*01 ligand binding domains. In some embodiments, the ligand binding domain binds HLA-A*01 independent of the peptide in a pMHC complex comprising HLA-A*01. In some embodiments, the HLA-A*01 ligand binding domain comprises an scFv domain. In some embodiments, the HLA-A*01 ligand binding domain comprises a sequence of any one of SEQ ID NOs: 21767-21775. In some embodiments, the HLA-A*01 ligand binding domain comprises a sequence at least 90%, at least 95% or at least 99% identical to a sequence of any one of SEQ ID NO: 21767-21775.

[0428] In some embodiments, the HLA-A*01 scFv comprises (a) a VH comprising a complementarity determined region (CDR) 1 comprising the sequence of any one of SEQ ID NOs: 21585, 21578, 21576, 21583, 21794, 21581, and 21575; a VH CDR2 comprising the sequence of any one of SEQ ID NOs: 21608, 21600, 21598, 21606, 21605, and 21596; and a VH CDR3 comprising the sequence of any one of SEQ ID NOs: 21870, 21871, 21872, 21873, 21874, 21875, 21876, 21877, and 21878 and (b) a VL comprising a VL CDR1 comprising the sequence of any one of SEQ ID NOs: 21679, 21776, 21777, and 21681; a VL CDR2 comprising the sequence of any one of SEQ ID NOs: 21684, 21779, and 21781; and a VL CDR3 comprising the sequence of any one of SEQ ID NOs: 21686, 21783, 21785, and 21687.

[0429] In some embodiments, the non-target antigen comprises HLA-A*03, and the ligand binding domain of the second receptor comprises an HLA-A*03 ligand binding domain. Exemplary HLA-A*03 ligand binding domains are described in International Patent Application No. PCT/US2021/046733, which is incorporated herein by reference in its entirety for examples of sequences of HLA-A*03 ligand binding domains. In some embodiments, the ligand binding domain binds HLA-A*03 independent of the peptide in a pMHC complex comprising HLA-A*03. In some embodiments, the HLA-A*03 ligand binding domain comprises an scFv domain. In some embodiments, the HLA-A*03 ligand binding domain comprises a sequence of any one of SEQ ID NOs: 21753-21757. In some embodiments, the HLA-A*03 ligand binding domain comprises a sequence at least 90%, at least 95% or at least 99% identical to a sequence of any one of SEQ ID NOs: 21753-21757.

[0430] In some embodiments, the HLA-A*03 scFv comprises (a) a VH comprising a CDR1 comprising the sequence of any one of SEQ ID NOs: 21576-21579, 21585, 21586, 21590, 21788; a VH CDR2 comprising the sequence of any one of SEQ ID NOs: 21598-21600, 21603, 21608, 21609, 21795; and a VH CDR3 comprising the sequence of any one of SEQ ID NOs: 21801-21814 and (b) a VL comprising a VL CDR1 comprising the sequence of any one of SEQ ID NOs: 21679, 21680, 21776, and 21777; a VL CDR2 comprising the sequence of any one of SEQ ID NOs: 21684, and 21779-21781 and a VL CDR3 comprising the sequence of any one of SEQ ID NOs: 21686, and-21783-21785.

[0431] In some embodiments, the non-target antigen comprises HLA-A*11, and the ligand binding domain of the second receptor comprises an HLA-A*11 ligand binding domain. Exemplary HLA-A*11 ligand binding domains are described in International Patent Application No. PCT/US2021/046733, which is incorporated herein by reference in its entirety for examples of sequences of HLA-A*11 ligand binding domains. In some embodiments, the ligand binding domain binds HLA-A*11 independent of the peptide in a pMHC complex comprising HLA-A*11. In some embodiments, the HLA-A*11 ligand binding domain comprises an scFv domain. In some embodiments, the HLA-A*11 ligand binding domain comprises a sequence of any one of SEQ ID NOs: 21699-21707. In some embodiments, the HLA-A*11 ligand binding domain comprises a sequence at least 90%, at least 95% or at least 99% identical to a sequence of any one of SEQ ID NOs: 21699-21707.

[0432] In some embodiments, the HLA-A*11 scFv comprises (a) a VH comprising a CDR1 comprising the sequence of any one of SEQ ID NOs: 21576, 21790, 21593, 21791, and 21574; a VH CDR2 comprising the sequence of any one of SEQ ID NOs: 21598, 21797, 21597, 21798, and 21602; and a VH CDR3 comprising the sequence of any one of SEQ ID NOs: 21816-21824 and (b) a VL comprising a VL CDR1 comprising the sequence of SEQ ID NO: 21680; a VL CDR2 comprising the sequence of SEQ ID NO: 21684; and a VL CDR3 comprising the sequence of SEQ ID NO: 21686.

[0433] In some embodiments, the non-target antigen comprises HLA-B*07, and the ligand binding domain of the second receptor comprises an HLA-B*07 ligand binding domain. Exemplary HLA-B*07 ligand binding domains are described in International Patent Application No. PCT/US2021/046733, which is incorporated herein by reference in its entirety for examples of sequences of HLA-B*07 ligand binding domains. In some embodiments, the ligand binding domain binds HLA-B*07 independent of the peptide in a pMHC complex comprising HLA-B*07. In some embodiments, the HLA-B*07 ligand binding domain comprises an scFv domain. In some embodiments, the HLA-B*07 ligand binding domain comprises a sequence of any one of SEQ ID NOs: 21689-21698. In some embodiments, the HLA-B*07 ligand binding domain comprises a sequence at least 90%, at least 95% or at least 99% identical to a sequence of any one of SEQ ID NOs: 21689-21698.

[0434] In some embodiments, the HLA-B*07 scFv comprises (a) a VH comprising a CDR1 comprising the sequence of SEQ ID NO: 21789; a VH CDR2 comprising the sequence of SEQ ID NO: 21796; and a VH CDR3 comprising the sequence of SEQ ID NO: 21815 and (b) a VL comprising a VL CDR1 comprising the sequence of SEQ ID NO: 21778; a VL CDR2 comprising the sequence of SEQ ID NO: 21782; and a VL CDR3 comprising the sequence of SEQ ID NO: 21786.

[0435] In some embodiments, the non-target antigen comprises HLA-C*07, and the ligand binding domain of the second receptor comprises an HLA-C*07 ligand binding domain. Exemplary HLA-C*07 ligand binding domains are described in International Patent Application No. PCT/US2021/046733, which is incorporated herein by reference in its entirety for examples of sequences of HLA-C*07 ligand binding domains. In some embodiments, the ligand binding domain binds HLA-C*07 independent of the peptide in a pMHC complex comprising HLA-C*07. In some embodiments, the HLA-C*07 ligand binding domain comprises an scFv domain. In some embodiments, the HLA-C*07 ligand binding domain comprises a sequence of any one of SEQ ID NOs: 21708-21752. In some embodiments, the HLA-C*07 ligand binding domain comprises a sequence at least 90%, at least 95% or at least 99% identical to a sequence of any one of SEQ ID NOs: 21708-21752.

[0436] In some embodiments, the HLA-C*07 scFv comprises (a) a VH comprising a CDR1 comprising the sequence of any one of SEQ ID NOs: 21585, 21578, 21577, 21576, 21593, 21591, 21589, 21583, 21792, and 21793; a VH CDR2 comprising the sequence of any one of SEQ ID NOs: 21608, 21600, 21599, 21598, 21597, 21613, 21612, 21606, 21799, and 21800; and a VH CDR3 comprising the sequence of any one of SEQ ID NOs: 21825-21869 and (b) a VL comprising a VL CDR1 comprising the sequence of any one of SEQ ID NOs: 21679, 21680, 21777, 21682, and 21681; a VL CDR2 comprising the sequence of any one of SEQ ID NOs: 152, 21684, 21780, and 21781; and a VL CDR3 comprising the sequence of any one of SEQ ID NOs: 157, 21686, 21784, 21785, 21787, and 21687.

### Minor Histocompatibility Antigens

[0437] In some embodiments, the second, inhibitor ligand comprises a minor histocompatibility antigen (MiHA). In some embodiments, the second, inhibitor ligand comprises an allele of a MiHA that is lost in a target cell through LOH.

[0438] MiHAs are peptides derived from proteins that contain nonsynonymous differences between alleles and are displayed by common HLA alleles. The non-synonymous differences can arise from SNPs, deletions, frameshift mutations or insertions in the coding sequence of the gene encoding the MiHA. Exemplary MiHAs can be about 9-12 amino acids in length and can bind to MHC class I and MHC class II proteins. Binding of the TCR to the MHC complex displaying the MiHA can activate T cells. The genetic and immunological properties of MiHAs will be known to the person of ordinary skill in the art. Candidate MiHAs are known peptides presented by known HLA class I alleles, are known to elicit T cell responses in the clinic (for example, in graft versus host disease, or transplant rejection, and allow for patient selection by simple SNP genotyping.

[0439] In some embodiments, the MiHA has broad or ubiquitous RNA expression.

[0440] In some embodiments, the MiHA has high minor allele frequency.

[0441] In some embodiments, the MiHA comprises a peptide derived from a Y chromosome gene.

[0442] In some embodiments, the second inhibitor ligand comprises a MiHA selected from the group of MiHAs disclosed in Table 2 and Table 3.

[0443] Exemplary, but non-limiting, examples of MiHAs that are envisaged as within the scope of the instant invention are disclosed in Table 2 below. Columns in 2 indicate, from left to right, the name of the MiHA, the gene which from which it is derived, MHC class I variant which can display the MiHA and the sequences of the peptide variants [A/B variants indicated in brackets).

TABLE 2
HLA Class I Autosomal MiHAs.

| MiHA | Gene | HLA | Peptide A/B |
|---|---|---|---|
| LB-CYBA- | cytochrome b-245 alpha chain | A*01:01 | STMERWGQK[Y/H] (SEQ ID |
| 1Y | (CYBA) | | NO: 303) |
| LB-OAS1- | 2′-5′-oligoadenylate synthetase | A*01:01 | ETDDPR[R/T]YQKY (SEQ ID |
| 1R | 1 (OAS1) | | NO: 304) |
| HA-1/A2 | Rho GTPase activating protein | A*02:01 | VL[H/R]DDLLEA (SEQ ID NO: |
| | 45 (HMHA1) | | 273) |
| HA-2 | myosin IG (MYO1G) | A*02:01 | YIGEVLVS[V/M] (SEQ ID NO: |
| | | | 305) |
| HA-8 | pumilio RNA binding family | A*02:01 | [R/P]TLDKVLEV (SEQ ID NO: |
| | member 3 (KIAA0020, PUM3) | | 306) |
| HA-3 | A-kinase anchoring protein 13 | A*01:01 | V[T/M]EPGTAQY (SEQ ID NO: |
| | (AKAP13) | | 307) |
| HwA11-S | chromosome 19 open reading | A*02:01 | CIPPD[S/T]LLFPA (SEQ ID |
| | frame 48 (C19ORF48) | | NO: 308) |
| LB-ADIR- | torsin family 3 member A | A*02:01 | SVAPALAL[F/S]PA (SEQ ID |
| 1F | (TOR3A) | | NO: 309) |
| LB- | HIVEP zinc finger 1 (HIVEP1) | A*02:01 | SLPKH[S/N]VTI (SEQ ID NO: |
| HIVEP1-1S | | | 310) |
| LB-NISCH- | nischarin (NISCH) | A*02:01 | ALAPAP[A/V]EV (SEQ ID NO: |
| 1A | | | 311) |
| LB-SSR1- | signal sequence receptor | A*02:01 | [S/L]LAVAQDLT (SEQ ID |
| 1S | subunit 1 (SSR1) | | NO:312) |
| LB-WNK1- | WNK lysine deficient protein | A*02:01 | RTLSPE[I/M]ITV (SEQ ID NO: |
| 1I | kinase 1 (WNK1) | | 313) |
| T4A | tripartite motif containing 4 | A*02:01 | GLYTYWSAG[A/E] (SEQ ID |
| | (TRIM42) | | NO: 314) |
| UTA2-1 | retroelement silencing factor 1 | A*02:01 | QL[L/P]NSVLTL (SEQ ID NO: |
| | (KIAA1551) | | 315) |
| LB- | citramalyl-CoA lyase | A*02:01 | SLAA(Y/D)IPRL (SEQ ID NO: |
| CLYBL-1Y | (CLYBL) | | 316) |
| TRIM22 | tripartite motif containing 22 | A*02:01 | MAVPPC[C/R]IGV (SEQ ID |
| | (TRIM22) | | NO: 317) |
| PARP10-1L | poly(ADP-ribose) polymerase | A*02:01 | GL[L/P]GQEGLVEI (SEQ ID |
| | family member 10 (PARP10) | | NO: 318) |
| FAM119A- | methyltransferase like 21A | A*02:01 | AMLERQF[T/I]V (SEQ ID NO: |
| 1T | (FAM119A) | | 319) |
| GLRX3-1S | glutaredoxin 3 (GLRX3) | A*02:01 | FL[S/P]SANEHL (SEQ ID NO: |
| | | | 320) |
| HNF4G-1M | hepatocyte nuclear factor 4 | A*02:01 | M[M/I]YKDILLL (SEQ ID NO: |
| | gamma (HNF4G) | | 321) |
| HMMR-1V | hyaluronan mediated motility | A*02:01 | SLQEK[V/A]AKA (SEQ ID NO: |
| | receptor (HMMR) | | 322) |
| BCL2A1 | BCL2 related protein Al | A*02:01 | VLQ[N/K]VAFSV (SEQ ID NO: |
| | (BCL2A1) | | 323) |
| CDC26-1F | cell division cycle 26 (CDC26) | A*02:01 | [F/S]VAGTQEVFV (SEQ ID |
| | | | NO: 324) |
| APOBEC3F- | apolipoprotein B mRNA | A*02:01 | FL[S/A]EHPNVTL (SEQ ID |
| 1S/A | editing enzyme catalytic | | NO: 325) |
| | subunit 3F (APOBEC3F) | | |
| LB-PRCP- | prolylcarboxypeptidase | A*02:01 | FMWDVAE[D/E]L (9 mer) (SEQ |
| 1D | (PRCP) | | ID NO: 326), |
| | | | FMWDVAE[D/E]LKA (11 mer) |
| | | | (SEQ ID NO: 327) |
| LB-CCL4- | C-C motif chemokine ligand 4 | A*02:01 | CADPSE[T/S]WV (SEQ ID NO: |
| 1T | (CCL4) | | 328) |
| LB- | non-SMC condensin II | A*02:01 | WL[Q/R]GVVPVV (SEQ ID |
| NCAPD3- | complex subunit D (NCAPD3) | | NO: 329) |
| 1Q | | | |
| LB-NDC80- | NDC80 kinetochore complex | A*02:01 | HLEEQI[P/A]KV (SEQ ID NO: |
| 1P | component (NDC80) | | 330) |
| LB-TTK- | TTK protein kinase (TTK) | A*02:01 | RLH[D/E]GRVFV (SEQ ID NO: |
| 1D | | | 331) |
| WDR27-1L | WD repeat domain 27 | A*02:01 | S[L/P]DDHVVAV (SEQ ID NO: |
| | (WDR27) | | 332) |
| MIIP | migration and invasion | A*02:01 | SEESAVP[K/E]RSW (11 mer) |
| | inhibitory protein (MIIP) | | (SEQ ID NO: 333), |
| | | | EESAVP[K/E]RSW (10 mer) |
| | | | (SEQ ID NO: 334) |
| HER- | E erb-b2 receptor tyrosine | A*02:01 | not reported |
| 2/NEU | kinase 2 (RBB2) | | |
| LB- | DEAH-box helicase 33 | A*02:01, | YLYEGGIS[C/R] (SEQ ID NO: |
| DHX33-1C | (DHX33) | C*03:03 | 335) |
| PANE1 | centromere protein M | A*03:01 | RVWDLPGVLK (SEQ ID NO: |
| | (CENPM) | | 336) |
| SP110 | SP110 nuclear body protein | A*03:01 | SLP[R/G]GTSTPK (SEQ ID NO: |
| | (SP110) | | 337) |
| ACC-1C/Y | BCL2 related protein Al | A*24:02 | DYLQ[Y/C]VLQI (SEQ ID NO: |
| | (BCL2A1) | | 338) |
| P2RX7 | purinergic receptor P2X 7 | A*29:02 | WFHHC[H/R]PKY (SEQ ID |
| | (P2RX7) | | NO: 339) |
| ACC-4 | cathepsin H (CTSH) | A*31:01 | ATLPLLCA[R/G] (SEQ ID NO: |
| | | | 340) |
| ACC-5 | CTSH | A*33:03 | WATLPLLCA[R/G] (SEQ ID |
| | | | NO: 341) |
| AKAP13 | A-kinase anchoring protein 13 | B*07:02 | APAGVREV[M/T] (SEQ ID NO: |
| | (AKAP13) | | 342) |
| LB- | apolipoprotein B mRNA | B*07:02, | [K/E]PQYHAEMCF (SEQ ID |
| APOBEC3B- | editing enzyme catalytic | B*08:01 | NO: 343) |
| 1K | subunit 3B (APOBEC3B) | | |
| APOBEC3H | apolipoprotein B mRNA | B*07:02 | KPQQ[K/E]GLRL (SEQ ID NO: |
| | editing enzyme catalytic | | 344) |
| | subunit 3H (APOBEC3H) | | |
| LB- | Rho GDP dissociation inhibitor | B*07:02 | LPRACW[R/P]EA (SEQ ID NO: |
| ARHGDIB- | beta (ARHGDIB) | | 345) |
| 1R | | | |
| LB- | BCAT2 - branched chain | B*07:02 | QP[R/T]RALLFVIL (SEQ ID |
| BCAT2-1R | amino acid transaminase 2 | | NO: 346) |
| | (BCAT2) | | |
| BFAR | bifunctional apoptosis regulator | B*07:02 | APNTGRANQQ[M/R] (SEQ ID |
| | (BFAR) | | NO: 347) |
| C14orf169 | ribosomal oxygenase 1 | B*07:02 | RPR[A/V]PTEELAL (SEQ ID |
| | (C14orf169 or RIOX1) | | NO: 348) |
| LB- | C16ORF | B*07:02 | [R/W]PCPSVGLSFL (SEQ ID |
| C16ORF- | | | NO: 349) |
| 1R | | | |
| C18orf21 | chromosome 18 open reading | B*07:02 | NPATP[A/T]SKL (SEQ ID NO: |
| | frame 21 (C18orf21) | | 350) |
| LB-EBI3-1I | Epstein-Barr virus induced 3 | B*07:02 | RPRARYY[I/V]QV (SEQ ID |
| | (EBI3) | | NO: 351) |
| POP1 | POP1 homolog, ribonuclease | B*07:02 | LPQKKS[N/K]AL (SEQ ID NO: |
| | P/MRP subunit (POP1) | | 352) |
| SCRIB | scribble planar cell polarity | B*07:02 | LPQQPP[L/P]SL (SEQ ID NO: |
| | protein (SCRIB) | | 353) |
| MTRR | 5-methyltetrahydrofolate- | B*07:02 | SPAS[S/L]RTDL (SEQ ID NO: |
| | homocysteine | | 354) |
| | methyltransferase reductase | | |
| | (MTRR) | | |
| LLGL2 | LLGL scribble cell polarity | B*07:02 | SPSL[R/H]ILAI (SEQ ID |
| | complex component 2 | | NO: 355) |
| | (LLGL2) | | |
| LB-ECGF- | thymidine phosphorylase | B*07:02 | RP[H/R]AIRRPLAL (SEQ ID |
| 1H | (TYMP) | | NO: 356) |
| LB-ERAP1- | endoplasmic reticulum | B*07:02 | HP[R/P]QEQIALLA (11 mer) |
| 1R | aminopeptidase 1 (ERAP1) | | (SEQ ID NO: 357), |
| | | | HP[R/P]QEQIAL (9 mer) (SEQ |
| | | | ID NO: 358) |
| LB- | alpha-L-fucosidase 2 (FUCA2) | B*07:02 | RLRQ[V/M]GSWL (SEQ ID |
| FUCA2-1V | | | NO: 359) |
| LB- | gem nuclear organelle | B*07:02, | FPALRFVE[V/E] (SEQ ID NO: |
| GEMIN4- | associated protein 4 (GEMIN4) | B*08:01 | 360) |
| 1V | | | |
| HDGF | heparin binding growth factor | B*07:02 | LPMEVEKNST[L/P] (SEQ ID |
| | (HDGF) | | NO: 361) |
| LB- | programmed cell death 11 | B*07:02 | GPDSSKT[F/L]LCL (SEQ ID |
| PDCD11-1F | (PDCD11) | | NO: 362) |
| LB-PFAS- | phosphoribosylformylglycina | B*07:02 | A[P/S]GHTRRKL (SEQ ID NO: |
| 1P | midine synthase (PFAS) | | 363) |
| LB-TEP1- | telomerase associated protein 1 | B*07:02 | APDGAKVA[S/P]L (SEQ ID |
| 1S | (TEP1) | | NO: 364) |
| LB- | post- | B*07:02 | RPRSVT[I/V]QPLL (SEQ ID |
| TMEM8A- | glycosylphosphatidylinositol | | NO: 365) |
| 1I | attachment to proteins 6 | | |
| | (TMEM8A or PGAP6) | | |
| LB-USP15- | ubiquitin specific peptidase 15 | B*07:02 | MPSHLRN[I/T]LL (SEQ ID NO: |
| 1I | (USP15) | | 366) |
| LRH-1 | purinergic receptor P2X 5 | B*07:02 | TPNQRQNVC (SEQ ID NO: |
| | (P2RX5) | | 367) |
| LB- | MOB kinase activator 3A | B*07:02 | [C/S]PRPGTWTC (SEQ ID NO: |
| MOB3A-1C | (MOB3A) | | 368) |
| LB- | zinc finger DHHC-type | B*07:02 | RPR[Y/H]WILLVKI (SEQ ID |
| ZDHHC6- | palmitoyltransferase 6 | | NO: 369) |
| 1Y | (ZDHHC6) | | |
| ZAPHIR | zinc finger protein 419 | B*07:02 | IPRDSWWVEL (SEQ ID NO: |
| | (ZNF419) | | 370) |
| HEATR1 | HEAT repeat containing 1 | B*08:01 | ISKERA[E/G]AL (SEQ ID NO: |
| | (HEATR1) | | 371) |
| LB-GSTP1- | glutathione S-transferase pi 1 | B*08:01 | DLRCKY[V/I]SL (SEQ ID NO: |
| 1V | (GSTP1) | | 372) |
| HA-1/B60 | Rho GTPase activating protein | B*40:01 | KECVL[H/R]DDL (SEQ ID NO: |
| | 45 (HMHA1) | | 373) |
| LB-SON- | SON DNA and RNA binding | B*40:01 | SETKQ[R/C]TVL (SEQ ID NO: |
| 1R | protein (SON) | | 374) |
| LB- | switching B cell complex | B*40:01 | MEQLE[Q/E]LEL (SEQ ID NO: |
| SWAP70- | subunit SWAP70 (SWAP70) | | 375) |
| 1Q | | | |
| LB- | thyroid hormone receptor | B*40:01 | G[E/G][P/S]QDL[C/G]TL (SEQ |
| TRIP10- | interactor 10 (TRIP10) | | ID NO: 376) |
| 1EPC | | | |
| LB- | nucleoporin 133 (NUP133) | B*40:01 | SEDLILC[R/Q]L (SEQ ID NO: |
| NUP133-1R | | | 377) |
| LB-ZNFX1- | zinc finger NFX1-type | B*40:01 | NEIEDVW[Q/H]LDL (SEQ ID |
| 1Q | containing 1 (ZNFX1) | | NO: 378) |
| SLC1A5 | solute carrier family 1 member | B*40:02 | AE[A/P]TANGGLAL (SEQ ID |
| | 5 (SLC1A5) | | NO: 379) |
| ACC-2 | BCL2A1 | B*44:02, | KEFED[D/G]IINW (SEQ ID |
| | | B*44:03 | NO: 380) |
| ACC-6 | histocompatibility minor serpin | B*44:03 | MEIFIEVFSHF (SEQ ID NO: |
| | domain containing (HMSD) | | 381) |
| HB-1H/Y | histocompatibility minor HB-1 | B*44:03 | EEKRGSL[H/Y]VW (SEQ ID |
| | (HMHB1) | | NO: 382) |
| DPH1 | diphthamide biosynthesis 1 | B*57:01 | S[V/L]LPEVDVW (SEQ ID NO: |
| | (DPH1) | | 383) |
| UGT2B17/ | UDP glucuronosyltransferase | A*02:06 | CVATMIFMI (SEQ ID NO: 384) |
| A02 | family 2 member B17 | | |
| | (UGT2B17) | | |
| UGT2B17/ | UGT2B17 | A*29:02 | AELLNIPFLY (SEQ ID NO: |
| A29 | | | 385) |
| UGT2B17/ | UGT2B17 | B*44:03 | AELLNIPFLY (SEQ ID NO: |
| B44 | | | 386) |

[0444] Exemplary, but non-limiting, examples of MiHAs that are envisaged as within the scope of the instant invention are disclosed in Table 9 below. Columns in Table 3 indicate, from left to right, the name of the MiHA, the gene which from which it is derived, MHC class I variant which can display the MiHA and the sequences of the peptide variants [A/B variants indicated in brackets).

TABLE 3
HLA Class I Y linked MiHAs.

| MiHA | Gene | HLA | Peptide A/B |
|---|---|---|---|
| DFFRY | ubiquitin specific peptidase 9 | A*01:01 | IVD[C/S]LTEMY (SEQ ID NO: |
| | Y-linked (DFFRY) | | 387) |
| SMCY | lysine demethylase 5 (SMCY) | A*02:01 | FIDSYICQV (SEQ ID NO: 388) |
| TMSB4Y | thymosin beta 4 Y-linked | A*33:03 | EVLLRPGLHFR (SEQ ID NO: |
| | (TMSB4Y) | | 389) |
| SMCY | SMCY | B*07:02 | SP[S/A]VDKA[R/Q]AEL (SEQ |
| | | | ID NO: 34) |
| UTY | ubiquitously transcribed | B*08:01 | LPHN[H/R]T[D/N]L (SEQ ID |
| | tetratricopeptide repeat | | NO: 25) |
| | containing, Y-linked (UTY) | | |
| RPS4Y | ribosomal protein S4 Y-linked 1 | B*52:01 | TIRYPDP[V/L]I (SEQ ID NO: |
| | (RPS4Y) | | 24) |
| UTY | UTY | B*60:01 | [R/G]ESEE[E/A]S[V/P]SL |
| | | | (SEQ ID NO: 23) |

[0445] In some embodiments, the MiHA comprises HA-1. HA-1 is a peptide antigen having a sequence of VL[H/R]DDLLEA (SEQ ID NO: 264), and is derived from the Rho GTPase activating protein 45 (HA-1) gene.

[0446] Exemplary ligand binding domains that selectively bind to HA-1 variant H peptide (VLHDDLLEA (SEQ ID NO: 187)) are set forth in SEQ ID NOs: 189, 191, 193, 195, and 196. Illustrative nucleic acid sequences encoding ligand binding domains that selectively bind to HA-1 variant H peptide (VLHDDLLEA (SEQ ID NO: 187)) are set forth in SEQ ID NOs: 190, 192, 194, 197, and 198.

[0447] TCR alpha and TCR beta sequences in SEQ ID NO: 189 are separated by a P2A self-cleaving polypeptide of sequence ATNFSLLKQAGDVEENPGP (SEQ ID NO: 188) with an N terminal GSG linker.

[0448] In some embodiments, the second, inhibitory ligand comprises HA-1(H). In some embodiments, the second, inhibitory ligand binding is isolated or derived from a TCR. In some embodiments, the second, inhibitory ligand binding domain comprises TCR alpha and TCR beta variable domains. In some embodiments, the TCR alpha and TCR beta variable domains are separated by a self cleaving polypeptide sequence. In some embodiments, the TCR alpha and TCR beta variable domains separated by a self cleaving polypeptide sequence comprise SEQ ID NO: 189. In some embodiments, the TCR alpha and TCR beta variable domains separated by a self cleaving polypeptide sequence comprise SEQ ID NO: 189, or a sequence having at least 90%, at least 95%, or at least 99% identity thereto. In some embodiments, the TCR alpha and TCR beta variable domains are encoded by a sequence of SEQ ID NO: 190, or a sequence having at least 80% identity, at least 90%, at least 95%, or at least 99% identity thereto. In some embodiments, the TCR alpha variable domain comprises SEQ ID NO: 195 or a sequence having at least 90%, at least 95%, or at least 99% identity thereto. In some embodiments, the TCR beta variable domain comprises SEQ ID NO: 196 or a sequence having at least 90%, at least 95%, or at least 99% identity thereto.

### Loss of Y Chromosome Antigens

[0449] In some embodiments, the second, inhibitor ligand comprises a Y chromosome gene, i.e. peptide encoded by a gene on the Y chromosome. In some embodiments, the second, inhibitor ligand comprises a peptide encoded by a Y chromosome gene that is lost in target cells through loss of Y chromosome (LoY). For example, about a third of the characterized MiHAs come from the Y chromosome. The Y chromosome contains over 200 protein coding genes, all of which are envisaged as within the scope of the instant disclosure.

[0450] As used herein, “loss of Y”, or “LoY” refers a genetic change that occurs at high frequency in tumors whereby one copy of part or all of the Y chromosome is deleted, leading to a loss of Y chromosome encoded gene(s).

[0451] Loss of Y chromosome is known to occur in certain cancers. For example, there is a reported 40% somatic loss of Y chromosome in renal clear cell cancers (Arseneault et al., Sci. Rep. 7: 44876 (2017)). Similarly, clonal loss of the Y chromosome was reported in 5 out of 31 in male breast cancer subjects (Wong et al., Oncotarget 6(42):44927-40 (2015)). Loss of the Y chromosome in tumors from male patients has been described as a “consistent feature” of head and neck cancer patients (el-Naggar et al., Am J Clin Pathol 105(1):102-8 (1996)). Further, Y chromosome loss was associated with X chromosome disomy in four of seven male patients with gastric cancer (Saal et al., Virchows Arch B Cell Pathol (1993)). Thus, Y chromosome genes can be lost in a variety of cancers, and can be used as inhibitor ligands with the engineered receptors of the instant disclosure targeting cancer cells.

### Antigen Binding Domains

[0452] The disclosure provides a first ligand binding domain that activates a first engineered receptor, thereby activating immune cells expressing the first engineered receptor, and a second ligand binding domain that activates a second engineered receptor that inhibits activation of immune cells expressing the second engineered receptor, even in the presence of the first engineered receptor bound to the first ligand.

[0453] Any type of ligand binding domain that can regulate the activity of a receptor in a ligand dependent manner is envisaged as within the scope of the instant disclosure. In some embodiments, the ligand binding domain is an antigen binding domain. Exemplary antigen binding domains include, inter alia, ScFv, SdAb, VP-only domains, and TCR antigen binding domains derived from the TCR α and β chain variable domains.

[0454] In some embodiments, the first, activator LBD comprises an antigen binding domain. In some embodiments, the second, inhibitor LBD comprises an antigen binding domain. Any type of antigen binding domain is envisaged as within the scope of the instant disclosure.

[0455] For example, the first, activator LBD and/or the second, inhibitor LBD can comprise an antigen binding domain that can be expressed as part of a contiguous polypeptide chain including, for example, a single domain antibody fragment (sdAb) or heavy chain antibodies HCAb, a single chain antibody (scFv) derived from a murine, humanized or human antibodies (Harlow et al., 1999, In: Using Antibodies: A Laboratory Manual, Cold Spring Harbor Laboratory Press, N.Y.; Harlow et al., 1989, In: Antibodies: A Laboratory Manual, Cold Spring Harbor, N.Y.; Houston et al., 1988, Proc. Natl. Acad. Sci. USA 85:5879-5883; Bird et al., 1988, Science 242:423-426). In some aspects, the first, activator LBD and/or the second, inhibitor LBD comprises an antigen binding domain that comprises an antibody fragment. In further aspects, the activator LBD comprises an antibody fragment that comprises a scFv or an sdAb. In further aspects, the inhibitor LBD comprises an antibody fragment that comprises a scFv or an sdAb.

[0456] The term “antibody,” as used herein, refers to a protein, or polypeptide sequences derived from an immunoglobulin molecule, which specifically binds to an antigen. Antibodies can be intact immunoglobulins of polyclonal or monoclonal origin, or fragments thereof and can be derived from natural or from recombinant sources.

[0457] The terms “antibody fragment” or “antibody binding domain” refer to at least one portion of an antibody, or recombinant variants thereof, that contains the antigen binding domain, i.e., an antigenic determining variable region of an intact antibody, that is sufficient to confer recognition and specific binding of the antibody fragment to a target, such as an antigen and its defined epitope. Examples of antibody fragments include, but are not limited to, Fab, Fab′, F(ab′)2, and FAT fragments, single-chain (sc)Fv (“scFv”) antibody fragments, linear antibodies, single domain antibodies (abbreviated “sdAb”) (either VL or VH), camelid VHH domains, and multi-specific antibodies formed from antibody fragments.

[0458] The term “scFv” refers to a fusion protein comprising at least one antibody fragment comprising a variable region of a light chain and at least one antibody fragment comprising a variable region of a heavy chain, wherein the light and heavy chain variable regions are contiguously linked via a short flexible polypeptide linker, and capable of being expressed as a single polypeptide chain, and wherein the scFv retains the specificity of the intact antibody from which it is derived.

[0459] “Heavy chain variable region” or “VH” (or, in the case of single domain antibodies, e.g., nanobodies, “VHH”) with regard to an antibody refers to the fragment of the heavy chain that contains three CDRs interposed between flanking stretches known as framework regions, these framework regions are generally more highly conserved than the CDRs and form a scaffold to support the CDRs.

[0460] Unless specified, as used herein a scFv may have the VL and VH variable regions in either order, e.g., with respect to the N-terminal and C-terminal ends of the polypeptide, the scFv may comprise VL-linker-VH or may comprise VH-linker-VL.

[0461] The term “antibody light chain,” refers to the smaller of the two types of polypeptide chains present in antibody molecules in their naturally occurring conformations. Kappa (“K”) and lambda (“λ”) light chains refer to the two major antibody light chain isotypes.

[0462] The term “recombinant antibody” refers to an antibody that is generated using recombinant DNA technology, such as, for example, an antibody expressed by a bacteriophage or yeast expression system. The term should also be construed to mean an antibody which has been generated by the synthesis of a DNA molecule encoding the antibody and which DNA molecule expresses an antibody protein, or an amino acid sequence specifying the antibody, wherein the DNA or amino acid sequence has been obtained using recombinant DNA or amino acid sequence technology which is available and well known in the art.

[0463] The term “Vβ domain”, “Vβ-only domain”, “β chain variable domain” or “single variable domain TCR (svd-TCR)” refers to an antigen binding domain that consists essentially of a single T Cell Receptor (TCR) beta variable domain that specifically binds to an antigen in the absence of a second TCR variable domain. In some embodiments, the first, activator LBD comprises or consists essentially of a Vβ-only domain. In some embodiments, the second, inhibitor LBD comprises or consists essentially of a Vβ-only domain.

[0464] In some embodiments, the Vβ-only domain may include additional elements besides the TCR variable domain, including additional amino acid sequences, additional protein domains (covalently associated, non-covalently associated or covalently and non-covalently associated with the TCR variable domain), fusion or non-covalent association of the TCR variable domain with other types of macromolecules (for example polynucleotides, polysaccharides, lipids, or a combination thereof), fusion or non-covalent association of the TCR variable domain with one or more small molecules, compounds, or ligands, or a combination thereof. Any additional element, as described, may be combined provided that the TCR variable domain is configured to specifically bind the epitope in the absence of a second TCR variable domain.

[0465] In other embodiments, the Vβ-only domain as described herein functions independently of an α chain that lacks a V α segment. For example, in some embodiments the one or more Vβ-only domains are fused to transmembrane (e.g., CD3ξ and CD28) and intracellular domain proteins (e.g., CD3, CD28, and/or 4-1BB) that are capable of activating T cells in response to antigen.

[0466] In some embodiments, the Vβ-only domain engages antigen using complementarity-determining regions (CDRs). Each s Vβ-only domain contains three complement determining regions (CDR1, CDR2, and CDR3).

[0467] In some embodiments, the first Vβ-only domain comprises a TCR Vβ domain or an antigen-binding fragment thereof.

[0468] In humans, the TCR variable regions of the α and γ chains are each encoded by a V and a J segment, whereas the variable region of β and δ chains are each additionally encoded by a D segment. There are multiple Variable (V), Diversity (D) and Joining (J) gene segments (e.g. 52 Vβ gene segments, 2 Dβ gene segments and 13 Jβ gene segments) (Janeway et al. (eds.), 2001, Immunobiology: The Immune System in Health and Disease. 5th Edition, New York, FIG. 4.13) which can be recombined in different V(D)J arrangements using the enzymes RAG-1 and RAG-2, which recognize recombination signal sequences (RSSs) adjacent to the coding sequences of the V, D and J gene segments. The RSSs consist of conserved heptamers and nonamers separated by spacers of 12 or 23 bp. The RSSs are found at the 3′ side of each V segment, on both the 5′ and 3′ sides of each D segment, and at the 5′ of each J segment. During recombination, RAG-1 and RAG-2 cause the formation of DNA hairpins at the coding ends of the joint (the coding joint) and removal of the RSSs and intervening sequence between them (the signal joint). The variable regions are further diversified at the junctions by deletion of a variable number of coding end nucleotides, the random addition of nucleotides by terminal deoxynucleotidyl transferase (TdT), and palindromic nucleotides that arise due to template-mediated fill-in of the asymmetrically cleaved coding hairpins.

[0469] Patent applications WO 2009/129247 (herein incorporated by reference in its entirety) discloses an in vitro system, referred to as the HuTarg system, which utilizes V(D)J recombination to generate de novo antibodies in vitro. This same system was used to generate the variable regions of the Vβ-only domain as in patent application WO 2017/091905 (herein incorporated by reference in its entirety) by using TCR-specific V, D and J elements. In natural in vivo systems, the nucleic acid sequences which encode CDR1 and CDR2 are contained within the V (α, β, γ or δ) gene segment and the sequence encoding CDR3 is made up from portions of V and J segments (for Vα or Vγ) or a portion of the V segment, the entire D segment and a portion of the J segment (for Vβ or Vδ), but with random insertions and deletions of nucleotides at the V-J and V-D-J recombination junctions due to action of TdT and other recombination and DNA repair enzymes. The recombined T-cell receptor gene comprises alternating framework (FR) and CDR sequences, as does the resulting T-cell receptor expressed therefrom (i.e. FR1-CDR1-FR2-CDR2-FR3-CDR3-FR4). Using in vitro V(D)J recombination (i.e. V-J or V-D-J recombination), randomized insertions and deletions may be added in or adjacent to CDR1, CDR2 and/or CDR3 (i.e. not just CDR3), additional insertions may be added using flanking sequences in recombination substrates before and/or after CDR1, CDR2 and/or CDR3, and additional deletions may be made by deleting sequences in recombination substrates in or adjacent to CDR1, CDR2 and/or CDR3.

[0470] In some embodiments, TCR Vβ chains were identified that specifically bind epitopes in the absence of TCR Vα chains. Exemplary CDR3 amino acid sequences that bind epitopes in the absence of TCR Vα chains are set forth in SEQ ID NOs: 199-205.

[0471] In some embodiments, the Vβ-only domain specifically binds to an epitope in the absence of a second TCR variable domain, and consists of optional N-terminal and/or C-terminal amino acid sequences (of any length or sequence) flanking a variable domain defined by FR1-CDR1-FR2-CDR2-FR3-CDR3-FR4 regions. FR1, FR2, FR3 and FR4 may be obtained from a natural Vα, Vβ, Vγ or Vδ domain or encoded by natural Vα, Vγ or Vδ gene segments, but optionally include deletions or insertions of (e.g. 0, 1, 2, 3, 4, 5 or more than 5 amino acids) amino acids independently at one or more of the C-terminus of FR1, the N-terminus of FR2, the C-terminus of FR2, the N-terminus of FR3, the C-terminus of FR3 and the N-terminus of FR4. CDR1, CDR2 and CDR3 may be obtained from a natural Vα, Vγ or Vδ domain, or encoded by natural Vα, Vγ or Vδ gene segments, but wherein one or more of CDR1, CDR2 and CDR3 independently contains an insertion (e.g. 0, 1, 2, 3, 4, 5, 6, 7, 8, 9, 10 or more than 10 amino acids) and/or a deletion (e.g. 0, 1, 2, 3, 4, 5 or more than 5 amino acids) at the C-terminus, the N-terminus or anywhere within the CDR sequence. In some embodiments, the CDR1 contains an insertion or deletion of amino acids N-terminally, C-terminally or internally, wherein at least 50% (or optionally 60%, 70% or 80%) of natural CDR amino acid residues are retained. In some embodiments, the CDR2 contains an insertion or deletion of amino acids N-terminally, C-terminally or internally, wherein at least 50% (or optionally 60%, 70% or 80%) of natural CDR amino acid residues are retained. In some embodiments, the CDR3 contains an insertion or deletion of amino acids N-terminally, C-terminally or internally, wherein at least 50% (or optionally 60%, 70% or 80%) of natural CDR amino acid residues are retained. Insertions and/or deletions may be produced as a result of in vitro V(D)J recombination methods or from the in-vitro action of TdT and recombination and DNA repair enzymes (e.g. one or more of Artemis nuclease, NDA-dependent protein kinase (DNA-PK), X-ray repair cross-complementing protein 4 (XRCC4), DNA ligase IV, non-homologous end-joining factor 1 (NHEJ1), PAXX, and DNA polymerases λ and μ). Insertion and/or deletion (which includes substitution) may further result from insertions and/or deletions to CDR nucleic acid sequences of the in vitro V(D)J recombination substrates. The Vβ-only domain may further comprise a TCR constant region or portion thereof. The Vβ-only domain may be fused to and/or complexed with additional protein domains. A double stranded break in DNA may be introduced prior to in vitro use of the above recombination and DNA repair enzymes. The Vβ-only domain may be (or may be incorporated into) a fusion protein. As used herein, the term “fusion protein” means a protein encoded by at least one nucleic acid coding sequence that is comprised of a fusion of two or more coding sequences from separate genes, regardless of whether the organism source of those genes is the same or different.

[0472] In some embodiments, the first, activator LBD comprises an ScFv domain and the second, inhibitor LBD comprises a Vβ-only domain. In some embodiments, the first, activator LBD comprises a Vβ-only domain and the second, inhibitor LBD comprises an ScFv domain. In some embodiments, both the first, activator LBD and the second, inhibitor LBD are ScFv domains. In some embodiments, both the first, activator LBD and the second, inhibitor LBD are Vβ-only domains.

[0473] Additional antigen binding domains used with the activator and/or inhibitor receptors of the disclosure are set forth in SEQ ID NOs: 206, 208, 210,212, 214, 216, 218, and 220. Exemplary nucleic acid sequences encoding these antigen binding domains are set forth in SEQ ID NOs: 207, 209, 211, 213, 215, 217, 219, and 221. In some embodiments, the first or second ligand binding domain comprises a sequence of any one of SEQ ID NO: 206, SEQ ID NO: 208, SEQ ID NO: 210, SEQ ID NO: 212, SEQ ID NO: 214, SEQ ID NO: 216, SEQ ID NO: 218 or SEQ ID NO: 220, or a sequence having at least 90%, at least 95% or at least 99% identity thereto.

### Engineered Receptors

[0474] The disclosure provides a first engineered receptor comprising a first activator ligand binding domain and a second engineered receptor comprising a second inhibitor ligand binding domain described herein.

### Chimeric Antigen Receptors (CARs)

[0475] In some embodiments, the either the first or the second engineered receptor is a chimeric antigen receptor (CAR). In some embodiments, the first and second engineered receptors are chimeric antigen receptors. All CAR architectures are envisaged as within the scope of the instant disclosure.

### Extracellular Domains

[0476] In some embodiments, the first or second ligand binding domain is fused to the extracellular domain of the CAR.

### Hinge Region

[0477] In some embodiments, the CARs of the present disclosure comprise an extracellular hinge region. Incorporation of a hinge region can affect cytokine production from CAR-T cells and improve expansion of CAR-T cells in vivo. Exemplary hinges can be isolated or derived from IgD and CD8 domains, for example IgG1.

[0478] In some embodiments, the hinge is isolated or derived from CD8a or CD28. In some embodiments, the CD8a hinge comprises an amino acid sequence having at least 80% identity, at least 90% identity, at least 95% identity, at least 99% identity or is identical to a sequence of TTTPAPRPPTPAPTIASQPLSLRPEACRPAAGGAVHTRGLDFACD (SEQ ID NO: 1). In some embodiments, the CD8α hinge comprises SEQ ID NO: 1. In some embodiments, the CD8α hinge consists essentially of SEQ ID NO: 1. In some embodiments, the CD8α hinge is encoded by a nucleotide sequence having at least 80% identity, at least 90% identity, at least 95% identity, at least 99% identity or is identical to a sequence of

(SEQ ID NO: 2)
ACCACGACGCCAGCGCCGCGACCACCAACACCGGCGCCCACCATCGCGT
CGCAGCCCCTGTCCCTGCGCCCAGAGGCGTGCCGGCCAGCGGCGGGGGG
CGCAGTGCACACGAGGGGGCTGGACTTCGCCTGTGAT.

[0479] In some embodiments, the CD8α hinge is encoded by SEQ ID NO: 2.

[0480] In some embodiments, the CD28 hinge comprises an amino acid sequence having at least 80% identity, at least 90% identity, at least 95% identity, at least 99% identity or is identical to a sequence of CTIEVMYPPPYLDNEKSNGTIIHVKGKHLCPSPLFPGPSKP (SEQ ID NO: 3). In some embodiments, the CD28 hinge comprises or consists essentially of SEQ ID NO: 3. In some embodiments, the CD28 hinge is encoded by a nucleotide sequence having at least 80% identity, at least 90% identity, at least 95% identity, at least 99% identity or is identical to a sequence of

(SEQ ID NO: 4)
TGTACCATTGAAGTTATGTATCCTCCTCCTTACCTAGACAATGAGAAGA
GCAATGGAACCATTATCCATGTGAAAGGGAAACACCTTTGTCCAAGTCC
CCTATTTCCCGGACCTTCTAAGCCC.

[0481] In some embodiments, the CD28 hinge is encoded by SEQ ID NO: 4.

### Transmembrane Domain

[0482] The CARs of the present disclosure can be designed to comprise a transmembrane domain that is fused to the extracellular domain of the CAR. In some embodiments, the transmembrane domain that naturally is associated with one of the domains in the CAR is used. For example, a CAR comprising a CD28 co-stimulatory domain might also use a CD28 transmembrane domain. In some instances, the transmembrane domain can be selected or modified by amino acid substitution to avoid binding of such domains to the transmembrane domains of the same or different surface membrane proteins to minimize interactions with other members of the receptor complex.

[0483] The transmembrane domain may be derived either from a natural or from a synthetic source. Where the source is natural, the domain may be derived from any membrane-bound or transmembrane protein. Transmembrane regions may be isolated or derived from (i.e. comprise at least the transmembrane region(s) of) the alpha, beta or zeta chain of the T-cell receptor, CD28, CD3 epsilon, CD45, CD4, CDS, CD8, CD9, CD16, CD22, CD33, CD37, CD64, CD80, CD86, CD134, CD137, CD154, or from an immunoglobulin such as IgG4. Alternatively the transmembrane domain may be synthetic, in which case it will comprise predominantly hydrophobic residues such as leucine and valine. In some embodiments, a triplet of phenylalanine, tryptophan and valine will be found at each end of a synthetic transmembrane domain. Optionally, a short oligo- or polypeptide linker, preferably between 2 and 10 amino acids in length may form the linkage between the transmembrane domain and the cytoplasmic signaling domain of the CAR. A glycine-serine doublet provides a particularly suitable linker.

[0484] In some embodiments of the CARs of the disclosure, the CARs comprise a CD28 transmembrane domain. In some embodiments, the CD28 transmembrane domain comprises an amino acid sequence having at least 80% identity, at least 90% identity, at least 95% identity, at least 99% identity or is identical to a sequence of FWVLVVVGGVLACYSLLVTVAFIIFWV (SEQ ID NO: 5). In some embodiments, the CD28 transmembrane domain comprises or consists essentially of SEQ ID NO: 5. In some embodiments, the CD28 transmembrane domain is encoded by a nucleotide sequence having at least 80% identity, at least 90% identity, at least 95% identity, at least 99% identity or is identical to a sequence of SEQ ID NO: 6.

[0485] In some embodiments, the CD28 transmembrane domain is encoded by SEQ ID NO: 6.

[0486] In some embodiments of the CARs of the disclosure, the CARs comprise an IL-2Rbeta transmembrane domain. In some embodiments, the IL-2Rbeta transmembrane domain comprises an amino acid sequence having at least 80% identity, at least 90% identity, at least 95% identity, at least 99% identity or is identical to a sequence of IPWLGHLLVGLSGAFGFIILVYLLI (SEQ ID NO: 7). In some embodiments, the IL-2Rbeta transmembrane domain comprises or consists essentially of SEQ ID NO: 7. In some embodiments, the IL-2Rbeta transmembrane domain is encoded by a nucleotide sequence having at least 80% identity, at least 90% identity, at least 95% identity, at least 99% identity or is identical to a sequence of SEQ ID NO: 8. In some embodiments, the IL-2Rbeta transmembrane domain is encoded by SEQ ID NO: 8.

### Cytoplasmic Domain

[0487] The cytoplasmic domain or otherwise the intracellular signaling domain of the CARs of the instant invention is responsible for activation of at least one of the normal effector functions of the immune cell in which the CAR has been placed. The term “effector function” refers to a specialized function of a cell. Effector functions of a regulatory T cell, for example, include the suppression or downregulation of induction or proliferation of effector T cells. Thus the term “intracellular signaling domain” refers to the portion of a protein which transduces the effector function signal and directs the cell to perform a specialized function. While usually the entire intracellular signaling domain can be employed, in many cases it is not necessary to use the entire domain. To the extent that a truncated portion of the intracellular signaling domain is used, such truncated portion may be used in place of the intact chain as long as it transduces the effector function signal. In some cases, multiple intracellular domains can be combined to achieve the desired functions of the CAR-T cells of the instant disclosure. The term intracellular signaling domain is thus meant to include any truncated portion of one or more intracellular signaling domains sufficient to transduce the effector function signal.

[0488] Examples of intracellular signaling domains for use in the CARs of the instant disclosure include the cytoplasmic sequences of the T cell receptor (TCR) and co-receptors that act in concert to initiate signal transduction following antigen receptor engagement, as well as any derivative or variant of these sequences and any synthetic sequence that has the same functional capability.

[0489] Accordingly, the intracellular domain of CARs of the instant disclosure comprises at least one cytoplasmic activation domain. In some embodiments, the intracellular activation domain ensures that there is T-cell receptor (TCR) signaling necessary to activate the effector functions of the CAR T-cell. In some embodiments, the at least one cytoplasmic activation is a CD247 molecule (CD3ξ) activation domain, a stimulatory killer immunoglobulin-like receptor (KIR) KIR2DS2 activation domain, or a DNAX-activating protein of 12 kDa (DAP12) activation domain. In some embodiments, the CD3ξ activation domain comprises an amino acid sequence having at least 80% identity, at least 90% identity, at least 95% identity, at least 99% identity or is identical to a sequence of

(SEQ ID NO: 9)
RVKFSRSADAPAYKQGQNQLYNELNLGRREEYDVLDKRRGRDPEMGGKP
RRKNPQEGLYNELQKDKMAEAYSEIGMKGERRRGKGHDGLYQGLSTATK
DTYDALHMQALPPR.

[0490] In some embodiments, the CD3ξ activation domain comprises or consists essentially of SEQ ID NO: 9. In some embodiments, the CD3ξ activation domain is encoded by a nucleotide sequence having at least 80% identity, at least 90% identity, at least 95% identity, at least 99% identity or is identical to a sequence of SEQ ID NO: 10. In some embodiments, the CD3ξ activation domain is encoded by SEQ ID NO: 10.

[0491] It is known that signals generated through the TCR alone are often insufficient for full activation of the T cell and that a secondary or co-stimulatory signal is also required. Thus, T cell activation can be said to be mediated by two distinct classes of cytoplasmic signaling sequence: those that initiate antigen-dependent primary activation through the TCR (primary cytoplasmic signaling sequences) and those that act in an antigen-independent manner to provide a secondary or co-stimulatory signal (secondary cytoplasmic signaling sequences).

[0492] Primary cytoplasmic signaling sequences regulate primary activation of the TCR complex either in a stimulatory way, or in an inhibitory way. Primary cytoplasmic signaling sequences that act in a stimulatory manner may contain signaling motifs which are known as immunoreceptor tyrosine-based activation motifs or ITAMs. In some embodiments, the ITAM contains a tyrosine separated from a leucine or an isoleucine by any two other amino acids (YxxL) (SEQ ID NO: 21).

[0493] In some embodiments, the cytoplasmic domain contains 1, 2, or 3 ITAMs. In some embodiments, the cytoplasmic domain contains 1 ITAM. In some embodiments, the cytoplasmic domain contains 2 ITAMs. In some embodiments, the cytoplasmic domain contains 3 ITAMs. In some embodiments, the cytoplasmic domain contains 4 ITAMs. In some embodiments, the cytoplasmic domain contains 5 ITAMs.

[0494] In some embodiments, the cytoplasmic domain is a CD3ξ activation domain. In some embodiments, CD3ξ activation domain comprises a single ITAM. In some embodiments, CD3ξ activation domain comprises two ITAMs. In some embodiments, CD3ξ activation domain comprises three ITAMs.

[0495] In some embodiments, the CD3ξ activation domain comprising a single ITAM comprises an amino acid sequence having at least 80% identity, at least 90% identity, at least 95% identity, at least 99% identity or is identical to a sequence of RVKFSRSADAPAYQQGQNQLYNELNLGRREEYDVLHMQALPPR (SEQ ID NO: 11). In some embodiments, the CD3ξ activation domain comprises SEQ ID NO: 11. In some embodiments, the CD3ξ activation domain comprising a single ITAM consists essentially of an amino acid sequence of SEQ ID NO: 11. In some embodiments, the CD3ξ activation domain comprising a single ITAM is encoded by a nucleotide sequence having at least 80% identity, at least 90% identity, at least 95% identity, at least 99% identity or is identical to a sequence of SEQ ID NO: 12. In some embodiments, the CD3ξ activation domain is encoded by SEQ ID NO: 12.

[0496] Further examples of ITAM containing primary cytoplasmic signaling sequences that can be used in the CARs of the instant disclosure include those derived from TCRξ, FcRγ, FcRβ, CD3γ, CD3δ, CD3ε, CD3ξ, CD5, CD22, CD79a, CD79b, and CD66d. It is particularly preferred that cytoplasmic signaling molecule in the CAR of the instant invention comprises a cytoplasmic signaling sequence derived from CD3ξ.

### Co-Stimulatory Domain

[0497] In some embodiments, the cytoplasmic domain of the CAR can be designed to comprise the CD3 signaling domain by itself or combined with any other desired cytoplasmic domain(s) useful in the context of the CAR of the instant disclosure. For example, the cytoplasmic domain of the CAR can comprise a CD3 chain portion and a co-stimulatory domain. The co-stimulatory domain refers to a portion of the CAR comprising the intracellular domain of a costimulatory molecule. A costimulatory molecule is a cell surface molecule other than an antigen receptor or its ligands that is required for an efficient response of lymphocytes to an antigen. Examples of such molecules include the co-stimulatory domain is selected from the group consisting of IL-21V, Fc Receptor gamma (FcRγ), Fc Receptor beta (FcRβ), CD3g molecule gamma (CD3γ), CD36, CD3ε, CD5 molecule (CD5), CD22 molecule (CD22), CD79a molecule (CD79a), CD79b molecule (CD79b), carcinoembryonic antigen related cell adhesion molecule 3 (CD66d), CD27 molecule (CD27), CD28 molecule (CD28), TNF receptor superfamily member 9 (4-1BB), TNF receptor superfamily member 4 (OX40), TNF receptor superfamily member 8 (CD30), CD40 molecule (CD40), programmed cell death 1 (PD-1), inducible T cell costimulatory (ICOS), lymphocyte function-associated antigen-1 (LFA-1), CD2 molecule (CD2), CD7 molecule (CD7), TNF superfamily member 14 (LIGHT), killer cell lectin like receptor C2 (NKG2C) and CD276 molecule (B7-H3) c-stimulatory domains, or functional fragments thereof.

[0498] The cytoplasmic domains within the cytoplasmic signaling portion of the CARs of the instant disclosure may be linked to each other in a random or specified order. Optionally, a short oligo- or polypeptide linker, for example between 2 and 10 amino acids in length may form the linkage. A glycine-serine doublet provides an example of a suitable linker.

[0499] In some embodiments, the intracellular domains of CARs of the instant disclosure comprise at least one co-stimulatory domain. In some embodiments, the co-stimulatory domain is isolated or derived from CD28. In some embodiments, the CD28 co-stimulatory domain comprises an amino acid sequence having at least 80% identity, at least 90% identity, at least 95% identity, at least 99% identity or is identical to a sequence of

(SEQ ID NO: 13)
RSKRSRLLHSDYMNMTPRRPGPTRKHYQPYAPPRDFAAYRS.

[0500] In some embodiments, the CD28 co-stimulatory domain comprises or consists essentially of SEQ ID NO: 13. In some embodiments, the CD28 co-stimulatory domain is encoded by a nucleotide sequence having at least 80% identity, at least 90% identity, at least 95% identity, at least 99% identity or is identical to a sequence of SEQ ID NO: 14. In some embodiments, the CD28 co-stimulatory domain is encoded by SEQ ID NO: 14.

[0501] In some embodiments, the intracellular domain of the CARs of the instant disclosure comprises an interleukin-2 receptor beta-chain (IL-2Rbeta or IL-2R-beta) cytoplasmic domain. In some embodiments, the IL-2Rbeta domain is truncated. In some embodiments, the IL-2Rbeta cytoplasmic domain comprises one or more STATS-recruitment motifs. In some embodiments, the CAR comprises one or more STATS-recruitment motifs outside the IL-2Rbeta cytoplasmic domain.

[0502] In some embodiments, the IL-2-Rbeta intracellular domain comprises an amino acid sequence having at least 80% identity, at least 90% identity, at least 95% identity, at least 99% identity or is identical to a sequence of

(SEQ ID NO: 15)
NCRNTGPWLKKVLKCNTPDPSKFFSQLSSEHGGDVQKWLSSPFPSSSFS
PGGLAPEISPLEVLERDKVTQLLPLNTDAYLSLQELQGQDPTHLV.

[0503] In some embodiments, the IL2R-beta intracellular domain comprises or consists essentially of SEQ ID NO: 15. In some embodiments, the IL-2R-beta intracellular domain is encoded by a nucleotide sequence having at least 80% identity, at least 90% identity, at least 95% identity, at least 99% identity or is identical to a sequence of SEQ ID NO: 16.

[0504] In some embodiments, the IL-2R-beta intracellular domain is encoded by SEQ ID NO: 16.

[0505] In an embodiment, the IL-2R-beta cytoplasmic domain comprises one or more STATS-recruitment motifs. Exemplary STATS-recruitment motifs are provided by Passerini et al. (2008) STATS-signaling cytokines regulate the expression of FOXP3 in CD4+CD25+ regulatory T cells and CD4+CD25+ effector T cells. International Immunology, Vol. 20, No. 3, pp. 421-431, and by Kagoya et al. (2018) A novel chimeric antigen receptor containing a JAK—STAT signaling domain mediates superior antitumor effects. Nature Medicine doi: 10.1038/nm. 4478.

[0506] In some embodiments, the STATS-recruitment motif(s) consists of the sequence Tyr-Leu-Ser-Leu (SEQ ID NO: 17).

[0507] In some embodiments, the CAR comprises an intracellular domain isolated or derived from CD28, 4-1BB and/or CD3z, or a combination thereof. In some embodiments, the intracellular domain of the CAR comprises a CD28 co-stimulatory domain, a 4-1BB costimulatory domain, and a CD3ξ activation domain. In some embodiments, the intracellular domain of the CAR comprises a sequence of RSKRSRLLHSDYMNMTPRRPGPTRKHYQPYAPPRDFAAYRSKRGRKKLLYIFKQPF MRPVQTTQEEDGCSCRFPEEEEGGCELRVKFSRSADAPAYKQGQNQLYNELNLGRR EEYDVLDKRRGRDPEMGGKPRRKNPQEGLYNELQKDKMAEAYSEIGMKGERRRGK GHDGLYQGLSTATKDTYDALHMQALPPR (SEQ ID NO: 21903), or a sequence having at least 80% identity, at least 90% identity, at least 95% identity, at least 99% identity thereto. In some embodiments, the intracellular domain of the CAR is encoded by SEQ ID NO: 21904) or a sequence having at least 80% identity, at least 90% identity, at least 95% identity, at least 99% identity thereto. In some embodiments, the intracellular domain of the CAR is encoded by SEQ ID NO: 21904.

### Inhibitory Domains

[0508] In some embodiments, for example in the second engineered receptors of the disclosure which provide an inhibitory signal, the inhibitory signal is transmitted through the intracellular domain of the receptor. In some embodiments, the engineered receptor comprises an inhibitory intracellular domain. In some embodiments, the second engineered receptor is a CAR comprising an inhibitory intracellular domain (an inhibitory CAR).

[0509] In some embodiments, the inhibitory intracellular domain comprises an immunoreceptor tyrosine-based inhibitory motif (ITIM). In some embodiments, the inhibitory intracellular domain comprising an ITIM can be isolated or derived from an immune checkpoint inhibitor such as CTLA-4 and PD-1. CTLA-4 and PD-1 are immune inhibitory receptors expressed on the surface of T cells, and play a pivotal role in attenuating or terminating T cell responses.

[0510] Inhibitory domains can be isolated from human tumor necrosis factor related apoptosis inducing ligand (TRAIL) receptor and CD200 receptor 1.

[0511] In some embodiments, the inhibitory domain comprises an intracellular domain, a transmembrane or a combination thereof. In some embodiments, the inhibitory domain comprises an intracellular domain, a transmembrane domain, a hinge region or a combination thereof. In some embodiments, the inhibitory domain comprises an immunoreceptor tyrosine-based inhibitory motif (ITIM). In some embodiments, the inhibitory domain comprising an ITIM can be isolated or derived from an immune checkpoint inhibitor such as CTLA-4 and PD-1.

[0512] Inhibitory domains can be isolated from human tumor necrosis factor related apoptosis inducing ligand (TRAIL) receptor and CD200 receptor 1. In some embodiments, the inhibitory domain is isolated or derived from a human protein, for example a human TRAIL receptor, CTLA-4, or PD-1 protein. In some embodiments, the TRAIL receptor comprises TR10A, TR10B or TR10D.

[0513] Endogenous TRAIL is expressed as a 281-amino acid type II trans-membrane protein, which is anchored to the plasma membrane and presented on the cell surface. TRAIL is expressed by natural killer cells, which, following the establishment of cell-cell contacts, can induce TRAIL-dependent apoptosis in target cells. Physiologically, the TRAIL-signaling system was shown to be essential for immune surveillance, for shaping the immune system through regulating T-helper cell 1 versus T-helper cell 2 as well as “helpless” CD8+ T-cell numbers, and for the suppression of spontaneous tumor formation.

[0514] In some embodiments, the inhibitory domain comprises an intracellular domain isolated or derived from a CD200 receptor. The cell surface glycoprotein CD200 receptor 1 (Uniprot ref: Q8TD46) represents another example of an inhibitory intracellular domain of the present invention. This inhibitory receptor for the CD200/OX2 cell surface glycoprotein limits inflammation by inhibiting the expression of proinflammatory molecules including TNF-alpha, interferons, and inducible nitric oxide synthase (iNOS) in response to selected stimuli.

[0515] In some embodiments, the engineered receptor comprises an inhibitory domain isolated or derived from killer cell immunoglobulin like receptor, three Ig domains and long cytoplasmic tail 2 (KIR3DL2), killer cell immunoglobulin like receptor, three Ig domains and long cytoplasmic tail 3 (KIR3DL3), leukocyte immunoglobulin like receptor B1 (LIR1, also called LIR-1 and LILRB1), programmed cell death 1 (PD-1), Fc gamma receptor IIB (FcgRIIB), killer cell lectin like receptor K1 (NKG2D), CTLA-4, a domain containing a synthetic consensus ITIM, a ZAP70 SH2 domain (e.g., one or both of the N and C terminal SH2 domains), or ZAP70 KI_K369A (kinase inactive ZAP70).

[0516] In some embodiments, the inhibitory domain is isolated or derived from a human protein.

[0517] In some embodiments, the second, inhibitory receptor comprises a cytoplasmic domain and transmembrane domain isolated or derived from the same protein, for example an ITIM containing protein. In some embodiments, the second, inhibitory receptor comprises a cytoplasmic domain, a transmembrane domain, and an extracellular domain or a portion thereof isolated or derived isolated or derived from the same protein, for example an ITIM containing protein. In some embodiments, the second, inhibitory receptor comprises a hinge region isolated or derived from isolated or derived from the same protein as the intracellular domain and/or transmembrane domain, for example an ITIM containing protein.

[0518] In some embodiments, the second, inhibitory engineered receptor comprises an inhibitory domain. In some embodiments, the second, inhibitory engineered receptor comprises an inhibitory intracellular domain and/or an inhibitory transmembrane domain. In some embodiments, the second engineered receptor is a CAR comprising an inhibitory domain (an inhibitory CAR). In some embodiments, the inhibitory intracellular domain is fused to the intracellular domain of a CAR. In some embodiments, the inhibitory intracellular domain is fused to the transmembrane domain of a CAR.

### T Cell Receptors (TCRs)

[0519] In some embodiments, the first or second engineered receptor is a T Cell Receptor (TCR). In some embodiments, the first and second engineered receptors are a T Cell Receptors (TCR).

[0520] As used herein, a “TCR”, sometimes also called a “TCR complex” or “TCR/CD3 complex” refers to a protein complex comprising a TCR alpha chain, a TCR beta chain, and one or more of the invariant CD3 chains (zeta, gamma, delta and epsilon), sometimes referred to as subunits. The TCR alpha and beta chains can be disulfide-linked to function as a heterodimer to bind to peptide-MHC complexes. Once the TCR alpha/beta heterodimer engages peptide-MHC, conformational changes in the TCR complex in the associated invariant CD3 subunits are induced, which leads to their phosphorylation and association with downstream proteins, thereby transducing a primary stimulatory signal. In an exemplary TCR complex, the TCR alpha and TCR beta polypeptides form a heterodimer, CD3 epsilon and CD3 delta form a heterodimer, CD3 epsilon and CD3 gamma for a heterodimer, and two CD3 zeta form a homodimer.

### Extracellular Domains

[0521] The disclosure provides a first engineered receptor comprising a first extracellular ligand binding domain and a second engineered receptor comprising a second extracellular ligand binding domain. Either the first engineered receptor, the second engineered receptor, or both, may be a TCR. Any suitable ligand binding domain may be fused to an extracellular domain, hinge domain or transmembrane of the engineered TCRs described herein.

[0522] In some embodiments, the first and/or second ligand binding domain is fused to an extracellular domain of a TCR subunit. The TCR subunit can be TCR alpha, TCR beta, CD3 delta, CD3 epsilon or CD3 gamma. In some embodiments, both the first and second ligand binding domains are fused to the same TCR subunit in different TCR receptors. In some embodiments, the first and second ligand binding domains are fused to different TCR subunits in different TCR receptors. In some embodiments, the first, activator ligand binding domain is fused to a first TCR subunit in a first engineered receptor and the second, inhibitor ligand binding domain is fused to a second TCR subunit in a second engineered receptor. In some embodiments, the first and second TCR subunits are not the same subunit. In some embodiments, the first and second TCR subunits are the same subunit. For example, the first ligand binding domain can be fused to TCR alpha, and the second ligand binding domain can be fused to TCR beta. As a further example, the first ligand binding is fused to TCR beta and the second ligand binding domain used fused to TCR alpha.

[0523] In some embodiments, the first, activator LBD comprises an ScFv domain and the second, inhibitor LBD comprises a Vβ-only domain. In some embodiments, the first, activator LBD comprises a Vβ-only domain and the second, inhibitor LBD comprises an ScFv domain. In some embodiments, both the first, activator LBD and the second, inhibitor LBD are ScFv domains. In some embodiments, both the first, activator LBD and the second, inhibitor LBD are Vβ-only domains.

[0524] In some embodiments, the first engineered TCR of the disclosure comprises an extracellular domain comprising a Vβ-only domain, a transmembrane domain and an intracellular domain. In some embodiments, the intracellular domain comprises one or more exogenous domains.

[0525] In some embodiments, the first engineered TCR of the disclosure comprises an extracellular domain comprising an ScFv domain, a transmembrane domain and an intracellular domain. In some embodiments, the intracellular domain comprises one or more exogenous domains.

[0526] In some embodiments, the second engineered TCR of the disclosure comprises an extracellular domain comprising a Vβ-only domain, a transmembrane domain and an inhibitory intracellular domain.

[0527] In some embodiments, the second engineered TCR of the disclosure comprises an extracellular domain comprising an ScFv domain, a transmembrane domain and an inhibitory intracellular domain.

[0528] TCR subunits include TCR alpha, TCR beta, CD3 zeta, CD3 delta, CD3 gamma and CD3 epsilon. Any one or more of TCR alpha, TCR beta chain, CD3 gamma, CD3 delta or CD3 epsilon, or fragments or derivative thereof, can be fused to one or more domains capable of providing a stimulatory signal of the disclosure, thereby enhancing TCR function and activity. Any one or more of TCR alpha, TCR beta chain, CD3 gamma, CD3 delta or CD3 epsilon, or fragments or derivative thereof, can be fused to an inhibitory intracellular domain of the disclosure.

[0529] In some embodiments, for example those embodiments wherein the first engineered receptor or second engineered receptor comprises a first and a second polypeptide, the antigen binding domain is isolated or derived from a T cell receptor (TCR) extracellular domain or an antibody.

[0530] In some embodiments, the first engineered receptor and second engineered receptor comprise a first antigen binding domain and a second antigen binding domain. The antigen-binding domain or domains of the engineered receptor may be provided on the same or a different polypeptide as the intracellular domain.

[0531] In some embodiments, the antigen-binding domain of the first and/or second engineered receptor comprises a single chain variable fragment (scFv).

[0532] In some embodiments, the first and/or second engineered receptor comprises a second polypeptide. The disclosure provides receptors having two polypeptides each having a part of a ligand-binding domain (e.g. cognates of a heterodimeric LDB, such as a TCRα/β- or Fab-based LBD). The disclosure further provides receptors having two polypeptides, each having a part of a ligand-binding domain (e.g. cognates of a heterodimeric LDB, such as a TCRα/β- or Fab-based LBD) and one part of the ligand binding domain is fused to a hinge or transmembrane domain, while the other part of the ligand binding domain has no intracellular domain. Further variations include receptors where each polypeptide has a hinge domain, and where each polypeptide has a hinge and transmembrane domain. In some embodiments, the hinge domain is absent. In other embodiments, the hinge domain is a membrane proximal extracellular region (MPER), such as the LILRB1 D3D4 domain.

[0533] In some embodiments, for example those embodiments where the first and/or second engineered receptor comprises at least two polypeptides, the first polypeptide comprises a first chain of an antibody and the second polypeptide comprise a second chain of said antibody.

[0534] In some embodiments, the receptor comprises a Fab fragment of an antibody. In embodiments, a first polypeptide comprises an antigen-binding fragment of the heavy chain of the antibody and an intracellular domain, and a second polypeptide comprises an antigen-binding fragment of the light chain of the antibody. In some embodiments, the first polypeptide comprises an antigen-binding fragment of the light chain of the antibody and the intracellular domain, and the second polypeptide comprises an antigen-binding fragment of the heavy chain of the antibody.

[0535] In some embodiments, the first and/or second engineered receptor comprises an extracellular fragment of a T cell receptor (TCR). In some embodiments, a first polypeptide comprises an antigen-binding fragment of the alpha chain of the TCR and the intracellular domain, and a second polypeptide comprises an antigen-binding fragment of the beta chain of the TCR. In some embodiments, a first polypeptide comprises an antigen-binding fragment of the beta chain of the TCR and the intracellular domain, and the second polypeptide comprises an antigen-binding fragment of the alpha chain of the TCR.

### TCRs Comprising Vβ-Only Domains

[0536] Certain embodiments of present disclosure relate to engineered TCRs comprising a TCR variable domain, the TCR variable domain specifically binding to an antigen in the absence of a second TCR variable domain (a Vβ-only domain).

[0537] In some embodiments, the engineered TCR comprises additional elements besides the TCR variable domain, including additional amino acid sequences, additional protein domains (covalently associated, non-covalently associated or covalently and non-covalently associated with the TCR variable domain), fusion or non-covalent association of the TCR variable domain with other types of macromolecules (for example polynucleotides, polysaccharides, lipids, or a combination thereof), fusion or non-covalent association of the TCR variable domain with one or more small molecules, compounds, or ligands, or a combination thereof. Any additional element, as described, may be combined provided that the TCR variable domain is configured to specifically bind the epitope in the absence of a second TCR variable domain.

[0538] An engineered TCR comprising a Vβ-only domain as described herein may comprise a single TCR chain (e.g. α, β, γ, or δ chain), or it may comprise a single TCR variable domain (e.g. of α, β, γ, or δ chain). If the engineered TCR is a single TCR chain, then the TCR chain comprises a transmembrane domain, a constant (or C domain) and a variable (or V domain), and does not comprise a second TCR variable domain. The engineered TCR may therefore comprise or consist of a TCR α chain, a TCR β chain, a TCR γ chain or a TCR δ chain. The engineered TCR may be a membrane bound protein. The engineered TCR may alternatively be a membrane-associated protein.

[0539] In some embodiments, the engineered TCR as described herein utilizes a surrogate a chain that lacks a V α segment, which forms activation-competent TCRs complexed with the six CD3 subunits.

[0540] In other embodiments, the engineered TCR as described herein functions independently of a surrogate a chain that lacks a Vα segment. For example, in some embodiments the one or more engineered TCRs are fused to transmembrane (e.g., CD3ξ and CD28) and intracellular domain proteins (e.g., CD3ξ, CD28, and/or 4-1BB) that are capable of activating T cells in response to antigen.

[0541] In some embodiments, the engineered TCR comprises one or more single TCR chains fused to the Vβ-only domain described herein. For example, the engineered TCR may comprise, or consist essentially of single α TCR chain, a single β TCR chain, a single γ TCR chain, or a single δ TCR chain fused to one or more Vβ-only domains.

[0542] In some embodiments, the engineered TCR engages antigen using complementarity-determining regions (CDRs). Each engineered TCR contains three complement determining regions (CDR1, CDR2, and CDR3).

[0543] The first and/or second ligand binding Vβ-only domain may be a human TCR variable domain. Alternatively, the first and/or second Vβ-only domain may be a non-human TCR variable domain. The first and/or second Vβ-only domain may be a mammalian TCR variable domain. The first and/or second Vβ-only domain may be a vertebrate TCR variable domain.

[0544] In embodiments where Vβ-only domain is incorporated into a fusion protein, for example a fusion protein comprising a TCR subunit, and optionally, an additional stimulatory intracellular domain. The fusion protein may comprise a Vβ-only domain and any other protein domain or domains.

### Transmembrane Domains

[0545] The disclosure provide a first fusion protein comprising a first, activator LBD and a second fusion protein comprising a second, inhibitor LBD and an inhibitor intracellular domain. In some embodiments, the first and second fusion proteins comprise transmembrane domains.

[0546] The disclosure provides polypeptides comprising a transmembrane domain, and an intracellular domain capable of providing a stimulatory signal or an inhibitory signal. In some embodiments, the engineered TCR comprises multiple intracellular domains capable of providing a stimulatory signal.

[0547] A “transmembrane domain”, as used herein, refers to a domain of a protein that spans membrane of the cell. Transmembrane domains typically consist predominantly of non-polar amino acids, and may traverse the lipid bilayer once or several times. Transmembrane domains usually comprise alpha helices, a configuration which maximizes internal hydrogen bonding.

[0548] Transmembrane domains isolated or derived from any source are envisaged as within the scope of the fusion proteins of the disclosure.

[0549] In some embodiments, the transmembrane domain is one that is associated with one of the other domains of the fusion protein, or isolated or derived from the same protein as one of the other domains of the fusion protein. In some embodiments, the transmembrane domain and the second intracellular domain are from the same protein, for example a TCR complex subunit such as TCR alpha, TCR beta, CD3 delta, CD3 epsilon or CD3 gamma. In some embodiments, the extracellular domain (svd-TCR), the transmembrane domain and the second intracellular domain are from the same protein, for example a TCR complex subunit such as TCR alpha, TCR beta, CD3 delta, CD3 epsilon or CD3 gamma. In other embodiments, the extracellular domain (comprising one or more ligand binding domains, such as Vβ-only domain and ScFv domains), the transmembrane domain and the intracellular domain(s) are from different proteins. For example, in some embodiments the engineered svd-TCR comprises a CD28 transmembrane domain with a CD28, 4-1BB and CD3ξ intracellular domain.

[0550] The transmembrane domain may be derived either from a natural or from a recombinant source. Where the source is natural, the domain may be derived from any membrane-bound or transmembrane protein.

[0551] In some embodiments, the transmembrane domain is capable of signaling to the intracellular domain(s) whenever the TCR complex has bound to a target. A transmembrane domain of particular use in this invention may include at least the transmembrane region(s) of e.g., the alpha, beta or zeta chain of the TCR, CD3 delta, CD3 epsilon or CD3 gamma, CD28, CD3 epsilon, CD45, CD4, CDS, CD8, CD9, CD16, CD22, CD33, CD37, CD64, CD80, CD86, CD134, CD137, CD154.

[0552] In some embodiments, the transmembrane domain can be attached to the extracellular region of the fusion protein, e.g., the antigen binding domain of the TCR alpha or beta chain, via a hinge, e.g., a hinge from a human protein. For example, in one embodiment, the hinge can be a human immunoglobulin (Ig) hinge, e.g., an IgG4 hinge, or a CD8α hinge.

[0553] In some embodiments, the hinge is isolated or derived from CD8α or CD28. In some embodiments, the CD8α hinge comprises an amino acid sequence having at least 80% identity, at least 90% identity, at least 95% identity, at least 99% identity or is identical to a sequence of TTTPAPRPPTPAPTIASQPLSLRPEACRPAAGGAVHTRGLDFACD (SEQ ID NO: 1). In some embodiments, the CD8α hinge comprises SEQ ID NO: 1. In some embodiments, the CD8α hinge consists essentially of SEQ ID NO: 1. In some embodiments, the CD8α hinge is encoded by a nucleotide sequence having at least 80% identity, at least 90% identity, at least 95% identity, at least 99% identity or is identical to a sequence of:

(SEQ ID NO: 2)
ACCACGACGCCAGCGCCGCGACCACCAACACCGGCGCCCACCATCGCGT
CGCAGCCCCTGTCCCTGCGCCCAGAGGCGTGCCGGCCAGCGGCGGGGGG
CGCAGTGCACACGAGGGGGCTGGACTTCGCCTGTGAT.

[0554] In some embodiments, the CD8α hinge is encoded by SEQ ID NO: 2.

[0555] In some embodiments, the CD28 hinge comprises an amino acid sequence having at least 80% identity, at least 90% identity, at least 95% identity, at least 99% identity or is identical to a sequence of CTIEVMYPPPYLDNEKSNGTIIHVKGKHLCPSPLFPGPSKP (SEQ ID NO: 3. In some embodiments, the CD28 hinge comprises or consists essentially of SEQ ID NO: 3. In some embodiments, the CD28 hinge is encoded by a nucleotide sequence having at least 80% identity, at least 90% identity, at least 95% identity, at least 99% identity or is identical to a sequence of

(SEQ ID NO: 4)
TGTACCATTGAAGTTATGTATCCTCCTCCTTACCTAGACAATGAGAAGA
GCAATGGAACCATTATCCATGTGAAAGGGAAACACCTTTGTCCAAGTCC
CCTATTTCCCGGACCTTCTAAGCCC.

[0556] In some embodiments, the CD28 hinge is encoded by SEQ ID NO: 4.

[0557] In some embodiments, the transmembrane domain comprises a TCR alpha transmembrane domain. In some embodiments, the TCR alpha transmembrane domain comprises an amino acid sequence having at least 85% identity, at least 90% identity, at least 95% identity, at least 96% identity, at least 97% identity, at least 98% identity, at least 99% identity or is identical to a sequence of: VIGFRILLLKVAGFNLLMTLRLW (SEQ ID NO: 26). In some embodiments, the TCR alpha transmembrane domain comprises, or consists essentially of, SEQ ID NO: 26. In some embodiments, the TCR alpha transmembrane domain is encoded by a sequence of

(SEQ ID NO: 27)
GTGATTGGGTTCCGAATCCTCCTCCTGAAAGTGGCCGGGTTTAATCTGC
TCATGACGCTGCGGCTGTGG.

[0558] In some embodiments, the transmembrane domain comprises a TCR beta transmembrane domain. In some embodiments, the TCR beta transmembrane domain comprises an amino acid sequence having at least 85% identity, at least 90% identity, at least 95% identity, at least 96% identity, at least 97% identity, at least 98% identity, at least 99% identity or is identical to a sequence of: TILYEILLGKATLYAVLVSALVL (SEQ ID NO: 28). In some embodiments, the TCR beta transmembrane domain comprises, or consists essentially of, SEQ ID NO: 28. In some embodiments, the TCR beta transmembrane domain is encoded by a sequence of

(SEQ ID NO: 20)
ACCATCCTCTATGAGATCTTGCTAGGGAAGGCCACCTTGTATGCCGTGC
TGGTCAGTGCCCTCGTGCTG.

[0559] In some embodiments, the transmembrane comprises a CD3 zeta transmembrane domain. In some embodiments, the CD3 zeta transmembrane domain comprises an amino acid sequence having at least 85% identity, at least 90% identity, at least 95% identity, at least 96% identity, at least 97% identity, at least 98% identity, at least 99% identity or is identical to a sequence of: LCYLLDGILFIYGVILTALFL (SEQ ID NO: 29). In some embodiments, the CD3 zeta transmembrane domain comprises, or consists essentially of, SEQ ID NO: 29.

[0560] A transmembrane domain can include one or more additional amino acids adjacent to the transmembrane region, e.g., one or more amino acid associated with the extracellular region of the protein from which the transmembrane was derived (e.g., 1, 2, 3, 4, 5, 6, 7, 8, 9, 10 or up to 15 amino acids of the extracellular region) and/or one or more additional amino acids associated with the intracellular region of the protein from which the transmembrane protein is derived (e.g., 1, 2, 3, 4, 5, 6, 7, 8, 9, 10 or up to 15 amino acids of the intracellular region).

[0561] In some embodiments, the transmembrane domain can be selected or modified by amino acid substitution to avoid binding of such domains to the transmembrane domains of the same or different surface membrane proteins, e.g., to minimize interactions with other members of the receptor complex.

[0562] When present, the transmembrane domain may be a natural TCR transmembrane domain, a natural transmembrane domain from a heterologous membrane protein, or an artificial transmembrane domain. The transmembrane domain may be a membrane anchor domain. Without limitation, a natural or artificial transmembrane domain may comprise a hydrophobic a-helix of about 20 amino acids, often with positive charges flanking the transmembrane segment. The transmembrane domain may have one transmembrane segment or more than one transmembrane segment. Prediction of transmembrane domains/segments may be made using publicly available prediction tools (e.g. TMHMM, Krogh et al. Journal of Molecular Biology 2001; 305(3):567-580; or TMpred, Hofmann & Stoffel Biol. Chem. Hoppe-Seyler 1993; 347: 166). Non-limiting examples of membrane anchor systems include platelet derived growth factor receptor (PDGFR) transmembrane domain, glycosylphosphatidylinositol (GPI) anchor (added post-translationally to a signal sequence) and the like.

### Intracellular Domain

[0563] The disclosure provides fusion proteins comprising an intracellular domain. An “intracellular domain,” as the term is used herein, refers to an intracellular portion of a protein.

[0564] In some embodiments, the intracellular domain comprises one or more domains capable of providing a stimulatory signal to a transmembrane domain. In some embodiments, the intracellular domain comprises a first intracellular domain capable of providing a stimulatory signal and a second intracellular domain capable of providing a stimulatory signal. In other embodiments, the intracellular domain comprises a first, second and third intracellular domain capable of providing a stimulatory signal. The intracellular domains capable of providing a stimulatory signal are selected from the group consisting of a CD28 molecule (CD28) domain, a LCK proto-oncogene, Src family tyrosine kinase (Lck) domain, a TNF receptor superfamily member 9 (4-1BB) domain, a TNF receptor superfamily member 18 (GITR) domain, a CD4 molecule (CD4) domain, a CD8a molecule (CD8a) domain, a FYN proto-oncogene, Src family tyrosine kinase (Fyn) domain, a zeta chain of T cell receptor associated protein kinase 70 (ZAP70) domain, a linker for activation of T cells (LAT) domain, lymphocyte cytosolic protein 2 (SLP76) domain, (TCR) alpha, TCR beta, CD3 delta, CD3 gamma and CD3 epsilon intracellular domains.

[0565] In some embodiments, an intracellular domain comprises at least one intracellular signaling domain. An intracellular signaling domain generates a signal that promotes a function a cell, for example an immune effector function of a TCR containing cell, e.g., a TCR-expressing T-cell. In some embodiments, the intracellular domain of the fusion proteins of the disclosure includes at least one intracellular signaling domain. For example, the intracellular domains of CD3 gamma, delta or epsilon comprise signaling domains.

[0566] In some embodiments, the extracellular domain, transmembrane domain and intracellular domain are isolated or derived from the same protein, for example T-cell receptor (TCR) alpha, TCR beta, CD3 delta, CD3 gamma or CD3 epsilon.

[0567] Examples of intracellular domains for use in the fusion proteins of the disclosure include the cytoplasmic sequences of the TCR alpha, TCR beta, CD3 zeta, and 4-1BB, and the intracellular signaling co-receptors that act in concert to initiate signal transduction following antigen receptor engagement, as well as any derivative or variant of these sequences and any recombinant sequence that has the same functional capability.

[0568] In some embodiments, the intracellular signaling domain comprises a primary intracellular signaling domain. Exemplary primary intracellular signaling domains include those derived from the proteins responsible for primary stimulation, or antigen dependent stimulation.

[0569] An intracellular signaling domain is generally responsible for activation of at least one of the normal effector functions of the immune cell in which the fusion protein has been introduced. The term “effector function” refers to a specialized function of a cell. Effector function of a T-cell, for example, may be cytolytic activity or helper activity including the secretion of cytokines. Thus the term “intracellular signaling domain” refers to the portion of a protein which transduces the effector function signal and directs the cell to perform a specialized function.

[0570] While in some cases the entire intracellular signaling domain can be employed, in many cases it is not necessary to use the entire intracellular signaling domain. To the extent that a truncated portion of the intracellular signaling domain is used, such truncated portion may be used in place of the intact chain as long as it transduces the effector function signal. The term intracellular signaling domain is thus meant to include any truncated portion of the intracellular signaling domain sufficient to transduce the effector function signal.

[0571] In some embodiments, the intracellular domain comprises a CD3 delta intracellular domain. In some embodiments, the CD3 delta intracellular domain comprises an amino acid sequence having at least 85% identity, at least 90% identity, at least 95% identity, at least 96% identity, at least 97% identity, at least 98% identity, at least 99% identity or is identical to a sequence of

(SEQ ID NO: 30)
GHETGRLSGAADTQALLRNDQVYQPLRDRDDAQYSHLGGNWARNKGGSR
SKRSRLLHSDYMNMTPRRPGPTRKHYQPYAPPRDFAAYRS.

[0572] In some embodiments, the CD3 delta intracellular domain comprises or consists essentially of, SEQ ID NO: 30. In some embodiments, the CD3 delta intracellular domain is encoded by a sequence of SEQ ID NO: 31.

[0573] In some embodiments, the intracellular domain comprises a CD3 epsilon intracellular domain. In some embodiments, the CD3 epsilon intracellular domain comprises an amino acid sequence having at least 85% identity, at least 90% identity, at least 95% identity, at least 96% identity, at least 97% identity, at least 98% identity, at least 99% identity or is identical to a sequence of: KNRKAKAKPVTRGAGAGGRQRGQNKERPPPVPNPDYEPIRKGQRDLYSGLNQRRIG GSRSKRSRLLHSDYMNMTPRRPGPTRKHYQPYAPPRDFAAYRS (SEQ ID NO: 32). In some embodiments, the CD3 epsilon intracellular domain comprises or consists essentially of, SEQ ID NO: 32. In some embodiments, the CD3 epsilon intracellular domain is encoded by a sequence of SEQ ID NO: 19.

[0574] In some embodiments, the intracellular domain comprises a CD3 gamma intracellular domain. In some embodiments, the CD3 gamma intracellular domain comprises an amino acid sequence having at least 85% identity, at least 90% identity, at least 95% identity, at least 96% identity, at least 97% identity, at least 98% identity, at least 99% identity or is identical to a sequence of

(SEQ ID NO: 33)
GQDGVRQSRASDKQTLLPNDQLYQPLKDREDDQYSHLQGNQLRRNGGSR
SKRSRLLHSDYMNMTPRRPGPTRKHYQPYAPPRDFAAYRS.

[0575] In some embodiments, the CD3 gamma intracellular domain comprises, or consists essentially of, SEQ ID NO: 33. In some embodiments, the CD3 gamma intracellular domain is encoded by a sequence of SEQ ID NO: 22.

[0576] In some embodiments, the intracellular domain comprises a CD3 zeta intracellular domain. In some embodiments, the CD3 zeta intracellular domain comprises an amino acid sequence having at least 85% identity, at least 90% identity, at least 95% identity, at least 96% identity, at least 97% identity, at least 98% identity, at least 99% identity or is identical to a sequence of RVKFSRSADAPAYKQGQNQLYNELNLGRREEYDVLDKRRGRDPEMGGKPRRKNPQ EGLYNELQKDKMAEAYSEIGMKGERRRGKGHDGLYQGLSTATKDTYDALHMQALP PR (SEQ ID NO: 9) or a subsequence thereof.

[0577] In some embodiments, the CD3 zeta intracellular domain comprises, or consists essentially of, SEQ ID NO: 9.

[0578] In some embodiments, the intracellular domain comprises a TCR alpha intracellular domain. In some embodiments, a TCR alpha intracellular domain comprises Ser-Ser. In some embodiments, a TCR alpha intracellular domain is encoded by a sequence of TCCAGC (SEQ ID NO: 21885).

[0579] In some embodiments, the intracellular domain comprises a TCR beta intracellular domain. In some embodiments, the TCR beta intracellular domain comprises an amino acid sequence having at least 80% identity, at least 90% identity, or is identical to a sequence of: MAMVKRKDSR (SEQ ID NO: 35). In some embodiments, the TCR beta intracellular domain comprises, or consists essentially of SEQ ID NO: 35. In some embodiments, the TCR beta intracellular domain is encoded by a sequence of (SEQ ID NO: 36.

[0580] In some embodiments, the intracellular signaling domain comprises at least one stimulatory intracellular domain. In some embodiments, the intracellular signaling domain comprises a primary intracellular signaling domain, such as a CD3 delta, CD3 gamma and CD3 epsilon intracellular domain, and one additional stimulatory intracellular domain, for example a co-stimulatory domain. In some embodiments, the intracellular signaling domain comprises a primary intracellular signaling domain, such as a CD3 delta, CD3 gamma and CD3 epsilon intracellular domain, and two additional stimulatory intracellular domains.

[0581] Exemplary co-stimulatory intracellular signaling domains include those derived from proteins responsible for co-stimulatory signals, or antigen independent stimulation.

[0582] The term “co-stimulatory molecule” refers to the cognate binding partner on a T-cell that specifically binds with a co-stimulatory ligand, thereby mediating a co-stimulatory response by the T-cell, such as, but not limited to, proliferation. Co-stimulatory molecules are cell surface molecules other than antigen receptors. Co-stimulatory molecules and their ligands are required for an efficient immune response. Co-stimulatory molecules include, but are not limited to an MHC class I molecule, BTLA, a Toll ligand receptor, as well as DAP10, DAP12, CD30, LIGHT, OX40, CD2, CD27, CDS, ICAM-1, LFA-1 (CD11a/CD18) 4-1BB (CD137, TNF receptor superfamily member 9), and CD28 molecule (CD28).

[0583] A “co-stimulatory domain”, sometimes referred to as “a co-stimulatory intracellular signaling domain” can be the intracellular portion of a co-stimulatory protein. A co-stimulatory domain can be a domain of a co-stimulatory protein that transduces the co-stimulatory signal. A co-stimulatory protein can be represented in the following protein families: TNF receptor proteins, Immunoglobulin-like proteins, cytokine receptors, integrins, signaling lymphocytic activation molecules (SLAM proteins), and activating NK cell receptors. Examples of such molecules include CD27, CD28, 4-1BB (CD137), OX40, GITR, CD30, CD40, ICOS, BAFFR, HVEM, lymphocyte function-associated antigen-1 (LFA-1), CD2, CD7, LIGHT, NKG2C, SLAMF7, NKp80, CD160, B7-H3, a ligand that specifically binds with CD83, CD4, and the like. The co-stimulatory domain can comprise the entire intracellular portion, or the entire native intracellular signaling domain, of the molecule from which it is derived, or a functional fragment thereof.

[0584] In some embodiments, the stimulatory domain comprises a co-stimulatory domain. In some embodiments, the co-stimulatory domain comprises a CD28 or 4-1BB co-stimulatory domain. CD28 and 4-1BB are well characterized co-stimulatory molecules required for full T cell activation and known to enhance T cell effector function. For example, CD28 and 4-1BB have been utilized in chimeric antigen receptors (CARs) to boost cytokine release, cytolytic function, and persistence over the first-generation CAR containing only the CD3 zeta signaling domain. Likewise, inclusion of co-stimulatory domains, for example CD28 and 4-1BB domains, in engineered TCR can increase T cell effector function and specifically allow co-stimulation in the absence of co-stimulatory ligand, which is typically down-regulated on the surface of tumor cells.

[0585] In some embodiments, the stimulatory domain comprises a CD28 intracellular domain. In some embodiments, the CD28 intracellular domain comprises an amino acid sequence having at least 85% identity, at least 90% identity, at least 95% identity, at least 96% identity, at least 97% identity, at least 98% identity, at least 99% identity or is identical to a sequence of: RSKRSRLLHSDYMNMTPRRPGPTRKHYQPYAPPRDFAAYRS (SEQ ID NO: 13). In some embodiments, the CD28 intracellular domain comprises, or consists essentially of, RSKRSRLLHSDYMNMTPRRPGPTRKHYQPYAPPRDFAAYRS (SEQ ID NO: 13). In some embodiments, a CD28 intracellular domain is encoded by a nucleotide sequence comprising SEQ ID NO: 14.

[0586] In some embodiments, the stimulatory domain comprises a 4-1BB intracellular domain. In some embodiments, the 4-1BB intracellular domain comprises an amino acid sequence having at least 85% identity, at least 90% identity, at least 95% identity, at least 96% identity, at least 97% identity, at least 98% identity, at least 99% identity or is identical to a sequence of: KRGRKKLLYIFKQPFMRPVQTTQEEDGCSCRFPEEEEGGCEL (SEQ ID NO: 37). In some embodiments, the 4-1BB intracellular domain comprises, or consists essentially of, KRGRKKLLYIFKQPFMRPVQTTQEEDGCSCRFPEEEEGGCEL (SEQ ID NO: 37). In some embodiments, a 4-1BB intracellular domain is encoded by a nucleotide sequence comprising SEQ ID NO: 38.

### Inhibitory Domains

[0587] The disclosure provides inhibitory intracellular domains which can be fused to the transmembrane or intracellular domain of any of the TCR subunits to generate an inhibitory TCR. In those embodiments where the inhibitory receptor is an inhibitory CAR, the same intracellular domains described below to generate an inhibitory TCR can also be used to generate an inhibitory CAR.

[0588] In some embodiments, the inhibitory intracellular domain comprises an immunoreceptor tyrosine-based inhibitory motif (ITIM). In some embodiments, the inhibitory intracellular domain comprising an ITIM can be isolated or derived from an immune checkpoint inhibitor such as CTLA-4 and PD-1. CTLA-4 and PD-1 are immune inhibitory receptors expressed on the surface of T cells, and play a pivotal role in attenuating or terminating T cell responses.

[0589] Inhibitory domains can be isolated from human tumor necrosis factor related apoptosis inducing ligand (TRAIL) receptor and CD200 receptor 1.

[0590] In some embodiments, the inhibitory domain comprises an intracellular domain, a transmembrane or a combination thereof. In some embodiments, the inhibitory domain comprises an intracellular domain, a transmembrane domain, a hinge region or a combination thereof. In some embodiments, the inhibitory domain comprises an immunoreceptor tyrosine-based inhibitory motif (ITIM). In some embodiments, the inhibitory domain comprising an ITIM can be isolated or derived from an immune checkpoint inhibitor such as CTLA-4 and PD-1.

[0591] Inhibitory domains can be isolated from human tumor necrosis factor related apoptosis inducing ligand (TRAIL) receptor and CD200 receptor 1. In some embodiments, the inhibitory domain is isolated or derived from a human protein, for example a human TRAIL receptor, CTLA-4, or PD-1 protein. In some embodiments, the TRAIL receptor comprises TR10A, TR10B or TR10D.

[0592] Endogenous TRAIL is expressed as a 281-amino acid type II trans-membrane protein, which is anchored to the plasma membrane and presented on the cell surface. TRAIL is expressed by natural killer cells, which, following the establishment of cell-cell contacts, can induce TRAIL-dependent apoptosis in target cells. Physiologically, the TRAIL-signaling system was shown to be essential for immune surveillance, for shaping the immune system through regulating T-helper cell 1 versus T-helper cell 2 as well as “helpless” CD8+ T-cell numbers, and for the suppression of spontaneous tumor formation.

[0593] In some embodiments, the inhibitory domain comprises an intracellular domain isolated or derived from a CD200 receptor. The cell surface glycoprotein CD200 receptor 1 (Uniprot ref: Q8TD46) represents another example of an inhibitory intracellular domain of the present invention. This inhibitory receptor for the CD200/OX2 cell surface glycoprotein limits inflammation by inhibiting the expression of proinflammatory molecules including TNF-alpha, interferons, and inducible nitric oxide synthase (iNOS) in response to selected stimuli.

[0594] In some embodiments, the engineered receptor comprises an inhibitory domain isolated or derived from killer cell immunoglobulin like receptor, three Ig domains and long cytoplasmic tail 2 (KIR3DL2), killer cell immunoglobulin like receptor, three Ig domains and long cytoplasmic tail 3 (KIR3DL3), leukocyte immunoglobulin like receptor B1 (LIR1), programmed cell death 1 (PD-1), Fc gamma receptor IIB (FcgRIIB), killer cell lectin like receptor K1 (NKG2D), CTLA-4, a domain containing a synthetic consensus ITIM, a ZAP70 SH2 domain (e.g., one or both of the N and C terminal SH2 domains), or ZAP70 KI_K369A(kinas e inactive ZAP70).

[0595] In some embodiments, the inhibitory domain is isolated or derived from a human protein.

[0596] In some embodiments, the second, inhibitory receptor comprises a cytoplasmic domain and transmembrane domain isolated or derived from the same protein, for example an ITIM containing protein. In some embodiments, the second, inhibitory receptor comprises a cytoplasmic domain, a transmembrane domain, and an extracellular domain or a portion thereof isolated or derived isolated or derived from the same protein, for example an ITIM containing protein. In some embodiments, the second, inhibitory receptor comprises a hinge region isolated or derived from isolated or derived from the same protein as the intracellular domain and/or transmembrane domain, for example an ITIM containing protein.

[0597] In some embodiments, the second engineered receptor is a TCR comprising an inhibitory domain (an inhibitory TCR). In some embodiments, the inhibitory TCR comprises an inhibitory intracellular domain and/or an inhibitory transmembrane domain. In some embodiments, the inhibitory intracellular domain is fused to the intracellular domain of TCR alpha, TCR beta, CD3 delta, CD3 gamma or CD3 epsilon or a portion thereof a TCR. In some embodiments, the inhibitory intracellular domain is fused to the transmembrane domain of TCR alpha, TCR beta, CD3 delta, CD3 gamma or CD3 epsilon.

[0598] In some embodiments, the second engineered receptor is a TCR comprising an inhibitory domain (an inhibitory TCR). In some embodiments, the inhibitory domain is isolated or derived from LILRB1.

### LILRB1 Inhibitory Receptors

[0599] The disclosure provides a second, inhibitory receptor comprising a LILRB1 inhibitory domain, and optionally, a LILRB1 transmembrane and/or hinge domain, or functional variants thereof. The second, inhibitory receptor can be a CAR or TCR. The inclusion of the LILRB1 transmembrane domain and/or the LILRB1 hinge domain in the inhibitory receptor may increase the inhibitory signal generated by the inhibitory receptor compared to a reference inhibitory receptor having another transmembrane domain or another hinge domains. The second, inhibitory receptor comprising the LILRB1 inhibitory domain may be a CAR or TCR, as described herein. Any suitable ligand binding domain, as described herein, may be fused to the LILRB1-based second, inhibitory receptors.

[0600] Leukocyte immunoglobulin-like receptor subfamily B member 1 (LILRB1), also known as Leukocyte immunoglobulin-like receptor B1, as well as ILT2, LIR1, MIR7, PIRB, CD85J, ILT-2 LIR-1, MIR-7 and PIR-B, is a member of the leukocyte immunoglobulin-like receptor (LIR) family. The LILRB1 protein belongs to the subfamily B class of LIR receptors. These receptors contain two to four extracellular immunoglobulin domains, a transmembrane domain, and two to four cytoplasmic immunoreceptor tyrosine-based inhibitory motifs (ITIMs). The LILRB1 receptor is expressed on immune cells, where it binds to MHC class I molecules on antigen-presenting cells and transduces a negative signal that inhibits stimulation of an immune response. LILRB1 is thought to regulate inflammatory responses, as well as cytotoxicity, and to play a role in limiting auto-reactivity. Multiple transcript variants encoding different isoforms of LILRB1 exist, all of which are contemplated as within the scope of the instant disclosure.

[0601] In some embodiments of the inhibitory receptors described herein, the inhibitory receptor comprises one or more domains isolated or derived from LILRB1. In some embodiments of the receptors having one or more domains isolated or derived from LILRB1, the one or more domains of LILRB1 comprise an amino acid sequence that is at least 80%, at least 90%, at least 95%, at least 96%, at least 97%, at least 98%, at least 99% or is identical to a sequence or subsequence of SEQ ID NO: 62. In some embodiments, the one or more domains of LILRB1 comprise an amino acid sequence that is identical to a sequence or subsequence of SEQ ID NO: 65. In some embodiments, the one or more domains of LILRB1 consist of an amino acid sequence that is at least 80%, at least 90%, at least 95%, at least 96%, at least 97%, at least 98%, at least 99% or is identical to a sequence or subsequence of SEQ ID NO: 62. In some embodiments, the one or more domains of LILRB1 consist of an amino acid sequence that is identical to a sequence or subsequence of SEQ ID NO: 62.

[0602] In some embodiments of the receptors having one or more domains isolated or derived from LILRB1, the one or more domains of LILRB1 are encoded by a polynucleotide sequence that is at least 80%, at least 90%, at least 95%, at least 96%, at least 97%, at least 98%, at least 99% or is identical to a sequence or subsequence of SEQ ID NO: 62.

[0603] In some embodiments of the receptors having one or more domains of LILRB1, the one or more domains of LILRB1 are encoded by a polynucleotide sequence that is identical to a sequence or subsequence of SEQ ID NO: 62.

[0604] In various embodiments, an inhibitory receptor is provided, comprising a polypeptide, wherein the polypeptide comprises one or more of: an LILRB1 hinge domain or functional fragment or variant thereof; an LILRB1 transmembrane domain or a functional variant thereof; and an LILRB1 intracellular domain or an intracellular domain comprising at least one, or at least two immunoreceptor tyrosine-based inhibitory motifs (ITIMs), wherein each ITIM is independently selected from NLYAAV (SEQ ID NO: 64), VTYAEV (SEQ ID NO: 65), VTYAQL (SEQ ID NO: 66), and SIYATL (SEQ ID NO: 67).

[0605] As used herein an “immunoreceptor tyrosine-based inhibitory motif” or “ITIM” refers to a conserved sequence of amino acids with a consensus sequence of S/I/V/LxYxxI/V/L (SEQ ID NO: 265), or the like, that is found in the cytoplasmic tails of many inhibitory receptors of the immune system. After ITIM-possessing inhibitory receptors interact with their ligand, the ITIM motif is phosphorylated, allowing the inhibitory receptor to recruit other enzymes, such as the phosphotyrosine phosphatases SHP-1 and SHP-2, or the inositol-phosphatase called SHIP.

[0606] In some embodiments, the polypeptide comprises an intracellular domain comprising at least one immunoreceptor tyrosine-based inhibitory motif (ITIM), at least two ITIMs, at least 3 ITIMs, at least 4 ITIMs, at least 5 ITIMs or at least 6 ITIMs. In some embodiments, the intracellular domain has 1, 2, 3, 4, 5, or 6 ITIMs.

[0607] In some embodiments, the polypeptide comprises an intracellular domain comprising at least one ITIM selected from the group of ITIMs consisting of NLYAAV (SEQ ID NO: 64), VTYAEV (SEQ ID NO: 65), VTYAQL (SEQ ID NO: 66), and SIYATL (SEQ ID NO: 67).

[0608] In further particular embodiments, the polypeptide comprises an intracellular domain comprising at least two immunoreceptor tyrosine-based inhibitory motifs (ITIMs), wherein each ITIM is independently selected from NLYAAV (SEQ ID NO: 64), VTYAEV (SEQ ID NO: 65), VTYAQL (SEQ ID NO: 66), and SIYATL (SEQ ID NO: 67).

[0609] In some embodiments, the intracellular domain comprises both ITIMs NLYAAV (SEQ ID NO: 64) and VTYAEV (SEQ ID NO: 65). In some embodiments, the intracellular domain comprises a sequence at least 95% identical to SEQ ID NO: 68. In some embodiments, the intracellular domain comprises or consists essentially of a sequence identical to SEQ ID NO: 68.

[0610] In some embodiments, the intracellular domain comprises both ITIMs VTYAEV (SEQ ID NO: 65) and VTYAQL (SEQ ID NO: 66). In some embodiments, the intracellular domain comprises a sequence at least 95% identical to SEQ ID NO: 69. In some embodiments, the intracellular domain comprises or consists essentially of a sequence identical to SEQ ID NO: 69.

[0611] In some embodiments, the intracellular domain comprises both ITIMs VTYAQL (SEQ ID NO: 66) and SIYATL (SEQ ID NO: 67). In some embodiments, the intracellular domain comprises a sequence at least 95% identical to SEQ ID NO: 70. In some embodiments, the intracellular domain comprises or consists essentially of a sequence identical to SEQ ID NO:

[0612] In some embodiments, the intracellular domain comprises the ITIMs NLYAAV (SEQ ID NO: 64), VTYAEV (SEQ ID NO: 65), and VTYAQL (SEQ ID NO: 66). In some embodiments, the intracellular domain comprises a sequence at least 95% identical to SEQ ID NO: 71. In some embodiments, the intracellular domain comprises or consists essentially of a sequence identical to SEQ ID NO: 71.

[0613] In some embodiments, the intracellular domain comprises the ITIMs VTYAEV (SEQ ID NO: 65), VTYAQL (SEQ ID NO: 66), and SIYATL (SEQ ID NO: 67). In some embodiments, the intracellular domain comprises a sequence at least 95% identical to SEQ ID NO: 72. In some embodiments, the intracellular domain comprises or consists essentially of a sequence identical to SEQ ID NO: 72.

[0614] In some embodiments, the intracellular domain comprises the ITIMs NLYAAV (SEQ ID NO: 64), VTYAEV (SEQ ID NO: 65), VTYAQL (SEQ ID NO: 66), and SIYATL (SEQ ID NO: 67). In embodiments, the intracellular domain comprises a sequence at least 95% identical to SEQ ID NO: 73. In some embodiments, the intracellular domain comprises or consists essentially of a sequence identical to SEQ ID NO: 73.

[0615] In some embodiments, the intracellular domain comprises a sequence at least 95% identical to the LILRB1 intracellular domain (SEQ ID NO: 78). In some embodiments, the intracellular domain comprises or consists essentially of a sequence identical to the LILRB1 intracellular domain (SEQ ID NO: 78).

[0616] LILRB1 intracellular domains or functional variants thereof of the disclosure can have at least 1, at least 2, at least 4, at least 4, at least 5, at least 6, at least 7, or at least 8 ITIMs. In some embodiments, the LILRB1 intracellular domain or functional variant thereof has 2, 3, 4, 5, or 6 ITIMs.

[0617] In particular embodiments, the intracellular domain comprises two, three, four, five, or six immunoreceptor tyrosine-based inhibitory motifs (ITIMs), wherein each ITIM is independently selected from NLYAAV (SEQ ID NO: 64), VTYAEV (SEQ ID NO: 65), VTYAQL (SEQ ID NO: 66), and SIYATL (SEQ ID NO: 67).

[0618] In particular embodiments, the intracellular domain comprises at least three immunoreceptor tyrosine-based inhibitory motifs (ITIMs), wherein each ITIM is independently selected from NLYAAV (SEQ ID NO: 64), VTYAEV (SEQ ID NO: 65), VTYAQL (SEQ ID NO: 66), and SIYATL (SEQ ID NO: 67).

[0619] In particular embodiments, the intracellular domain comprises three immunoreceptor tyrosine-based inhibitory motifs (ITIMs), wherein each ITIM is independently selected from NLYAAV (SEQ ID NO: 64), VTYAEV (SEQ ID NO: 65), VTYAQL (SEQ ID NO: 66), and SIYATL (SEQ ID NO: 67).

[0620] In particular embodiments, the intracellular domain comprises four immunoreceptor tyrosine-based inhibitory motifs (ITIMs), wherein each ITIM is independently selected from NLYAAV (SEQ ID NO: 64), VTYAEV (SEQ ID NO: 65), VTYAQL (SEQ ID NO: 66), and SIYATL (SEQ ID NO: 67).

[0621] In particular embodiments, the intracellular domain comprises five immunoreceptor tyrosine-based inhibitory motifs (ITIMs), wherein each ITIM is independently selected from NLYAAV (SEQ ID NO: 64), VTYAEV (SEQ ID NO: 65), VTYAQL (SEQ ID NO: 66), and SIYATL (SEQ ID NO: 67).

[0622] In particular embodiments, the intracellular domain comprises six immunoreceptor tyrosine-based inhibitory motifs (ITIMs), wherein each ITIM is independently selected from NLYAAV (SEQ ID NO: 64), VTYAEV (SEQ ID NO: 65), VTYAQL (SEQ ID NO: 66), and SIYATL (SEQ ID NO: 67).

[0623] In particular embodiments, the intracellular domain comprises at least seven immunoreceptor tyrosine-based inhibitory motifs (ITIMs), wherein each ITIM is independently selected from NLYAAV (SEQ ID NO: 64), VTYAEV (SEQ ID NO: 65), VTYAQL (SEQ ID NO: 66), and SIYATL (SEQ ID NO: 67).

[0624] The LILRB1 protein has four immunoglobulin (Ig) like domains termed D1, D2, D3 and D4. In some embodiments, the LILRB1 hinge domain comprises an LILRB1 D3D4 domain or a functional variant thereof. In some embodiments, the LILRB1 D3D4 domain comprises a sequence at least 95%, at least 96%, at least 97%, at least 98%, at least 99% or identical to SEQ ID NO: 74. In some embodiments, the LILRB1 D3D4 domain comprises or consists essentially of SEQ ID NO: 74.

[0625] In some embodiments, the polypeptide comprises the LILRB1 hinge domain or functional fragment or variant thereof. In embodiments, the LILRB1 hinge domain or functional fragment or variant thereof comprises a sequence at least 95%, at least 96%, at least 97%, at least 98%, at least 99% identical or identical to SEQ ID NO: 81, SEQ ID NO: 74, or SEQ ID NO: 75. In embodiments, the LILRB1 hinge domain or functional fragment or variant thereof comprises a sequence at least 95% identical to SEQ ID NO: 81, SEQ ID NO: 74, or SEQ ID NO: 75.

[0626] In some embodiments, the LILRB1 hinge domain comprises a sequence identical to SEQ ID NO: 81, SEQ ID NO: 74, or SEQ ID NO: 75.

[0627] In some embodiments, the LILRB1 hinge domain consists essentially of a sequence identical to SEQ ID NO: 81, SEQ ID NO: 74, or SEQ ID NO: 75.

[0628] In some embodiments, the transmembrane domain is a LILRB1 transmembrane domain or a functional variant thereof. In some embodiments, the LILRB1 transmembrane domain or a functional variant thereof comprises a sequence at least 95% identical, at least 96% identical, at least 97% identical, at least 98% identical or at least 99% to SEQ ID NO: 81. In some embodiments, the LILRB1 transmembrane domain or a functional variant thereof comprises a sequence at least 95% identical to SEQ ID NO: 81. In some embodiments, the LILRB1 transmembrane domain comprises a sequence identical to SEQ ID NO: 81. In embodiments, the LILRB1 transmembrane domain consists essentially of a sequence identical to SEQ ID NO: 81.

[0629] In some embodiments, the transmembrane domain can be attached to the extracellular region of the second, inhibitory receptor, e.g., the antigen binding domain or ligand binding domain, via a hinge, e.g., a hinge from a human protein. For example, in some embodiments, the hinge can be a human immunoglobulin (Ig) hinge, e.g., an IgG4 hinge, a CD8α hinge or an LILRB1 hinge.

[0630] In some embodiments, the second, inhibitory receptor comprises an inhibitory domain. In some embodiments, the second, inhibitory receptor comprises an inhibitory intracellular domain and/or an inhibitory transmembrane domain. In some embodiments, the inhibitory domain is isolated or derived from LILR1B.

### Inhibitory Receptors Comprising Combinations of LILRB1 Domains

[0631] In some embodiments, the LILRB1-based inhibitory receptors of the disclosure comprise more than one LILRB1 domain or functional equivalent thereof. For example, in some embodiments, the inhibitory receptor comprises an LILRB1 transmembrane domain and intracellular domain, or an LILRB1 hinge domain, transmembrane domain and intracellular domain.

[0632] In particular embodiments, the inhibitory receptor comprises an LILRB1 hinge domain or functional fragment or variant thereof, and the LILRB1 transmembrane domain or a functional variant thereof. In some embodiments, the polypeptide comprises a sequence at least 95% identical, at least 96% identical, at least 97% identical, at least 98% identical, at least 99% identical or identical to SEQ ID NO: 76. In some embodiments, the polypeptide comprises a sequence at least 95% identical to SEQ ID NO: 76. In some embodiments, the polypeptide comprises a sequence identical to SEQ ID NO: 76.

[0633] In further embodiments, the inhibitory receptor comprises: the LILRB1 transmembrane domain or a functional variant thereof, and an LILRB1 intracellular domain and/or an intracellular domain comprising at least one immunoreceptor tyrosine-based inhibitory motif (ITIM), wherein the ITIM is selected from NLYAAV (SEQ ID NO: 64), VTYAEV (SEQ ID NO: 65), VTYAQL (SEQ ID NO: 66), and SIYATL (SEQ ID NO: 67). In some embodiments, the polypeptide comprises the LILRB1 transmembrane domain or a functional variant thereof, and an LILRB1 intracellular domain and/or an intracellular domain comprising at least two ITIM, wherein each ITIM is independently selected from NLYAAV (SEQ ID NO: 64), VTYAEV (SEQ ID NO: 65), VTYAQL (SEQ ID NO: 66), and SIYATL (SEQ ID NO: 67).

[0634] In some embodiments, the inhibitory receptor comprises a LILRB1 transmembrane domain and intracellular domain. In some embodiments, the polypeptide comprises a sequence at least 95% identical, at least 96% identical, at least 97% identical, at least 98% identical, at least 99% identical or identical to SEQ ID NO: 77. In some embodiments, the polypeptide comprises a sequence at least 95% identical to SEQ ID NO: 77. In some embodiments, the polypeptide comprises a sequence identical to SEQ ID NO: 77. In some embodiments, the inhibitory receptor comprises the LILRB1 transmembrane domain and intracellular domain of SEQ ID NO: 77 fused to an extracellular ligand binding domain. In some embodiments, the inhibitory receptor comprises a first polypeptide comprising SEQ ID NO: 77 fused to a TCR alpha variable domain, and a second polypeptide comprising SEQ ID NO: 77 fused to a TCR beta variable domain.

[0635] In preferred embodiments, the inhibitory receptor comprises: an LILRB1 hinge domain or functional fragment or variant thereof; an LILRB1 transmembrane domain or a functional variant thereof; and an LILRB1 intracellular domain and/or an intracellular domain comprising at least two immunoreceptor tyrosine-based inhibitory motifs (ITIMs), wherein each ITIM is independently selected from LYAAV (SEQ ID NO: 64), VTYAE (SEQ ID NO: 65), VTYAQL (SEQ ID NO: 66), and SIYATL (SEQ ID NO: 11).

[0636] In some embodiments, the inhibitory receptor comprises a sequence at least 95% identical to SEQ ID NO: 79 or SEQ ID NO: 80, or at least 99% identical to SEQ ID NO: 79 or SEQ ID NO: 80, or identical to SEQ ID NO: 79 or SEQ ID NO: 80.

[0637] In some embodiments, the polypeptide comprises a sequence at least 99% identical to SEQ ID NO: 76, or at least 99% identical to SEQ ID NO: 76, or identical to SEQ ID NO: 76.

[0638] In some embodiments, the polypeptide comprises a sequence at least 99% identical to SEQ ID NO: 77, or at least 99% identical to SEQ ID NO: 77, or identical to SEQ ID NO: 77.

### Linkers

[0639] In some embodiments, the engineered receptors comprise a linker linking two domains of the engineered receptor. Provided herein are linkers that, in some embodiments, can be used to link domains of the engineered receptors described herein.

[0640] The terms “linker” and “flexible polypeptide linker” as used in the context of linking protein domains, for example intracellular domains or domains within an scFv, refers to a peptide linker that consists of amino acids such as glycine and/or serine residues used alone or in combination, to link two domains together.

[0641] Any linker may be used and many fusion protein linker formats are known. For example, the linker may be flexible or rigid. Non-limiting examples of rigid and flexible linkers are provided in Chen et al. (Adv Drug Deliv Rev. 2013; 65(10):1357-1369).

[0642] The antigen-binding domains described herein may be linked to each other in a random or specified order.

[0643] The antigen-binding domains described herein may be linked to each other in any orientation of N to C terminus.

[0644] Optionally, a short oligo- or polypeptide linker, for example, between 2 and 40 amino acids (e.g., 2, 3, 4, 5, 6, 7, 8, 9, or 10 amino acids) in length may form the linkage between the domains.

[0645] In some embodiments, the linker is a peptide of 1, 2, 3, 4, 5, 6, 7, 8, 9, 10, 11, 12, 13, 14, 15, 16, 17, 18, 19, 20, 21, 22, 23, 24, 25, 26, 27, 28, 29, 30 or more than 30 amino acid residues. Non-limiting examples of amino acids found in linkers include Gly, Ser, Glu, Gin, Ala, Leu, Iso, Lys, Arg, Pro, and the like. In some embodiments, the linker is [(Gly)n1 Ser]n2, where n1 and n2 may be any number (e.g. n1 and n2 may independently be 1, 2, 4, 5, 6, 7, 8, 9, 10 or more than 10). In some embodiments, n1 is 4.

[0646] In some embodiments, the flexible polypeptide linker is a Gly/Ser linker and comprises the amino acid sequence (Gly-Gly-Ser), (Gly-Gly-Gly-Ser, SEQ ID NO: 227), or (Gly-Gly-Gly-Gly-Ser, SEQ ID NO: 222) which can be repeated n times, where n is a positive integer equal to or greater than 1. For example, n=1, n=2, n=3, n=4, n=5, n=6, n=7, n=8, n=9 and n=10. In some embodiments, the flexible polypeptide linkers include, but are not limited to, GGS, GGGGS (SEQ ID NO: 222), GGGGS GGGGS (SEQ ID NO: 223), GGGGS GGGGS GGGGS (SEQ ID NO: 224), GGGGS GGGGS GGGGS GG (SEQ ID NO: 225) or GGGGS GGGGS GGGGS GGGGS (SEQ ID NO: 226).

[0647] In some embodiments, the linkers include multiple repeats of (Gly Gly Ser), (Gly Ser) or (Gly Gly Gly Ser (SEQ ID NO: 227)). Also included within the scope of the invention are linkers described in WO2012/138475 (incorporated herein by reference).

[0648] In some embodiments, the linker sequence comprises a long linker (LL) sequence. In some embodiments, the long linker sequence comprises GGGGS (SEQ ID NO: 222), repeated four times. In some embodiments, a GGGGS GGGGS GGGGS GGGGS (SEQ ID NO: 226) is used to link intracellular domains in a TCR alpha fusion protein of the disclosure.

[0649] In some embodiments, the long linker sequence comprises GGGGS (SEQ ID NO: 222), repeated three times. In some embodiments, a GGGGS GGGGS GGGGS (SEQ ID NO: 224) is used to link intracellular domains in a TCR beta fusion protein of the disclosure.

[0650] In some embodiments, the linker sequence comprises a short linker (SL) sequence. In some embodiments, the short linker sequence comprises GGGGS (SEQ ID NO: 222).

[0651] In some embodiments, a glycine-serine doublet can be used as a suitable linker.

[0652] In some embodiments, domains are fused directly to each other via peptide bonds without use of a linker.

### Assays

[0653] Provided herein are assays that can be used to measure the activity of the engineered receptors of the disclosure.

[0654] The activity of engineered receptors can be assayed using a cell line engineered to express a reporter of receptor activity such as a luciferase reporter. Exemplary cell lines include Jurkat T cells, although any suitable cell line known in the art may be used. For example, Jurkat cells expressing a luciferase reporter under the control of an NFAT promoter can be used as effector cells. Expression of luciferase by this cell line reflects TCR-mediated signaling.

[0655] The reporter cells can be transfected with each of the various fusion protein constructs, combinations of fusion protein constructs or controls described herein.

[0656] Expression of the fusion proteins in reporter cells can be confirmed by using fluorescently labeled MHC tetramers, for example Alexa Fluor 647-labeled NY-ESO-1-MHC tetramer, to detect expression of the fusion protein.

[0657] To assay the activity of engineered receptors, target cells are loaded with antigen prior to exposure to the effector cells comprising the reporter and the engineered receptor. For example, target cells can be loaded with antigen at least 12, 14, 16, 18, 20, 22 or 24 hours prior to exposure to effector cells. Exemplary target cells include A375 cells, although any suitable cells known in the art may be used. In some cases, target cells can be loaded with serially diluted concentrations of an antigen, such as NY-ESO-1 peptide. The effector cells can then be co-cultured with target cells for a suitable period of time, for example 6 hours. Luciferase is then measured by luminescence reading after co-culture. Luciferase luminescence can be normalized to maximum and minimum intensity to allow comparison of activating peptide concentrations for each engineered receptor construct.

[0658] Provided herein are methods of determining the relative EC50 of engineered receptors of the disclosure. As used herein, “EC50” refers to the concentration of an inhibitor or agent where the response (or binding) is reduced by half. EC50s of engineered receptors of the disclosure refer to concentration of antigen where binding of the engineered receptor to the antigen is reduced by half. Binding of the antigen, or probe to the engineered receptor can be measured by staining with labeled peptide or labeled peptide-MHC complex, for example MHC:NY-ESO-1 pMHC complex conjugated with fluorophore. EC50 can be obtained by nonlinear regression curve fitting of reporter signal with peptide titration. Probe binding and EC50 can be normalized to the levels of benchmark TCR without a fusion protein, e.g. NY-ESO-1 (clone 1G4).

### Polynucleotides

[0659] The disclosure provides polynucleotides encoding the sequence(s) of the engineered receptors described herein.

[0660] In some embodiments, the sequence of the first and/or second fusion protein is operably linked to a promoter. In some embodiments, the sequence encoding the first fusion protein is operably linked to a first promoter, and the sequence encoding a second fusion protein is operably linked to a second promoter.

[0661] The disclosure provides polynucleotides encoding the sequence(s) of the activator and inhibitory receptors described herein.

[0662] In some embodiments, the sequence of the first and/or second receptor, or a fusion protein of the first and/or second receptor is operably linked to a promoter. In some embodiments, the sequence encoding the activator receptor, or a polypeptide thereof, is operably linked to a first promoter, and the sequence encoding a inhibitory receptor, or a fusion protein thereof, is operably linked to a second promoter.

[0663] The disclosure provides polynucleotides comprising the sequence(s) of the interfering RNA described herein. In some embodiments, the polynucleotides comprise the shRNA described herein. In some embodiments, the shRNA comprises a first sequence, having from end to 3′ end a sequence complementary to an HLA-A*02 mRNA; and a second sequence, having from 5′ end to 3′ end a sequence complementary to the first sequence. In some embodiments, the HLA-A*02 mRNA sequence comprises a coding sequence. In some embodiments, the HLA-A*02 mRNA sequence comprises an untranslated region. In some embodiments, the first and second sequence are present on a polynucleotide, wherein the first sequence and the second sequence are separated by 4, 5, 6, 7, 8, 9, 10, 11, 12, 13, 14, or 15 nucleotides, wherein the 4, 5, 6, 7, 8, 9, 10, 11, 12, 13, 14, or 15 nucleotides form a loop region in the shRNA. In some embodiments, the shRNA further comprises a 5′ flank sequence and a 3′ flank sequence, wherein the 5′ flank sequence is joined to the 5′ end of the first sequence, and wherein the 3′ flank sequence is joined to the 3′ end of the second sequence.

[0664] In some embodiments, the polynucleotide encoding an shRNA has from 5′ end to 3′ end, a 5′ flank sequence, a first sequence, a loop sequence, a second sequence, a 3′ flank sequence. In some embodiments, the polynucleotide encoding an shRNA has from 5′ end to 3′ end, a 5′ flank sequence, a second sequence, a loop sequence, a first sequence, and a 3′ flank sequence.

[0665] In some embodiments, the first sequences is 18, 19, 20, 21, or 22 nucleotides. In some embodiments, the first sequence is complementary to a sequence selected from SEQ ID NOs: 8476-16870. In some embodiments, the first sequence has GC content greater than or equal to 25% and less than 60%. In some embodiments, the first sequence is complementary to a sequence selected from SEQ ID NOs: 8476-12066. In some embodiments, the first sequence does not comprise four nucleotides of the same base or a run of seven C or G nucleotide bases. In some embodiments, the first sequence is complementary to a sequence selected from SEQ ID NOs: 8476-11584. In some embodiments, the first sequence is complementary to a sequence selected from SEQ ID NOs: 8476-8754. In some embodiments, the first sequence is complementary to a sequence selected from SEQ ID NOs: 8476-8561.

[0666] In some embodiments, the polynucleotide encoding an shRNA further comprises a promoter sequence and a terminator sequence. In some embodiments, the shRNA is operably linked to the promoter. In some embodiments, the polynucleotide has from 5′ end to 3′ end, a promoter sequence, a 5′ flank sequence, a first sequence, a loop sequence, a second sequence, a 3′ flank sequence, and a terminator. In some embodiments, the polynucleotide encodes, from end to 3′ end, a promoter sequence, a 5′ flank sequence, a second sequence, a loop sequence, a first sequence, a 3′ flank sequence, and a terminator sequence.

[0667] In some embodiments, the polynucleotides comprise a promoter operably linked to the shRNA, such as a mammalian, viral or synthetic promoter. In some embodiments, the promoter sequence is a U6 promoter sequence. In some embodiments, the promoter sequence shares at least 80%, at least 85%, at least 90%, at least 95%, at least 98%, at least 99% identity to SEQ ID NO: 16890. In some embodiments, the promoter sequence is SEQ ID NO: 16890. In some embodiments, the promoter sequence is a H1 promoter sequence. In some embodiments, the promoter sequence shares at least 80%, at least 85%, at least 90%, at least 95%, at least 98%, at least 99% identity to SEQ ID NO: 16891. In some embodiments, the promoter sequence is SEQ ID NO: 16891. In some embodiments, the promoter sequence is a 7SK promoter sequence. In some embodiments, the promoter sequence shares at least 80%, at least 85%, at least 90%, at least 95%, at least 98%, at least 99% identity to SEQ ID NO: 16892. In some embodiments, the promoter sequence is SEQ ID NO: 16892. In some embodiments, the promoter sequence is a Ef1a promoter sequence. In some embodiments, the promoter sequence shares at least 80%, at least 85%, at least 90%, at least 95%, at least 98%, at least 99% identity to SEQ ID NO: 16893. In some embodiments, the promoter sequence is SEQ ID NO: 16893.

### Vectors

[0668] The disclosure provides vectors comprising the polynucleotides described herein.

[0669] The disclosure provides vectors encoding the interfering RNA described herein. In some embodiments, the vectors encode the shRNA described herein. In some embodiments, the shRNA comprises a first sequence, having from 5′ end to 3′ end a sequence complementary to the HLA-A*02 mRNA; and a second sequence, having from 5′ end to 3′ end a sequence complementary to the first sequence. In some embodiments, the first and second sequence are present on a polynucleotide, wherein the first sequence and the second sequence are separated by 4, 5, 6, 7, 8, 9, 10, 11, 12, 13, 14, or 15 nucleotides, wherein the 4, 5, 6, 7, 8, 9, 10, 11, 12, 13, 14, or 15 nucleotides form a loop region in the shRNA. In some embodiments, the shRNA further comprises a 5′ flank sequence and a 3′ flank sequence, wherein the 5′ flank sequence is joined to the 5′ end of the first sequence, and wherein the 3′ flank sequence is joined to the 3′ end of the second sequence.

[0670] In some embodiments, the vectors encoding an shRNA has from 5′ end to 3′ end, a 5′ flank sequence, a first sequence, a loop sequence, a second sequence, a 3′ flank sequence. In some embodiments, the vectors encode, from 5′ end to 3′ end, and a 3′ flank sequence. In some embodiments, the vectors encode an shRNA has from 5′ end to 3′ end, a 5′ flank sequence, a second sequence, a loop sequence, a first sequence, and a 3′ flank sequence.

[0671] In some embodiments, the vectors encoding an shRNA further comprises a promoter sequence and a terminator sequence. In some embodiments, the shRNA is operably linked to the promoter. In some embodiments, the vector has from 5′ end to 3′ end, a promoter sequence, a 5′ flank sequence, a first sequence, a loop sequence, a second sequence, a 3′ flank sequence, and a terminator. In some embodiments, the vector has from 5′ end to 3′ end, a promoter sequence, a 5′ flank sequence, a second sequence, a loop sequence, a first sequence, a 3′ flank sequence, and a terminator sequence.

[0672] In some embodiments of the vectors of the disclosure, the promoter sequence is a U6 promoter sequence. In some embodiments, the promoter sequence shares at least 80%, at least 85%, at least 90%, at least 95%, at least 98%, at least 99% identity to SEQ ID NO: 16890. In some embodiments, the promoter sequence is SEQ ID NO: 16890. In some embodiments, the promoter sequence is a H1 promoter sequence. In some embodiments, the promoter sequence shares at least 80%, at least 85%, at least 90%, at least 95%, at least 98%, at least 99% identity to SEQ ID NO: 16891. In some embodiments, the promoter sequence is SEQ ID NO: 16891. In some embodiments, the promoter sequence is a 7SK promoter sequence. In some embodiments, the promoter sequence shares at least 80%, at least 85%, at least 90%, at least 95%, at least 98%, at least 99% identity to SEQ ID NO: 16892. In some embodiments, the promoter sequence is SEQ ID NO: 16892. In some embodiments, the promoter sequence is a Ef1a promoter sequence. In some embodiments, the promoter sequence shares at least 80%, at least 85%, at least 90%, at least 95%, at least 98%, at least 99% identity to SEQ ID NO: 16893. In some embodiments, the promoter sequence is SEQ ID NO: 16893.

[0673] In some embodiments, the vector described herein is a viral vector. In some embodiments, the vector is a lentiviral vector.

[0674] The disclosure provides vectors encoding an interfering RNA described herein and an inhibitory receptor. In some embodiments, the vector comprises an shRNA described herein and a polynucleotide encoding an inhibitor receptor comprising a ligand binding domain specific to a class I major histocompatibility complex (MHC-I) molecule, or a peptide-MHC complex thereof.

[0675] The disclosure provides polynucleotides encoding the sequence(s) of the activator and inhibitory receptors described herein.

[0676] The disclosure provides vectors comprising the polynucleotides described herein.

[0677] The disclosure provides vectors encoding the coding sequence or sequences of any of the engineered receptors described herein. In some embodiments, the sequence of the first and/or second fusion protein is operably linked to a promoter. In some embodiments, the sequence encoding the first fusion protein is operably linked to a first promoter, and the sequence encoding a second fusion protein is operably linked to a second promoter.

[0678] In some embodiments, the first engineered receptor is encoded by a first vector and the second engineered receptor is encoded by second vector. In some embodiments, both engineered receptors are encoded by a single vector.

[0679] In some embodiments, the first and second receptors are encoded by a single vector. Methods of encoding multiple polypeptides using a single vector will be known to persons of ordinary skill in the art, and include, inter alia, encoding multiple polypeptides under control of different promoters, or, if a single promoter is used to control transcription of multiple polypeptides, use of sequences encoding internal ribosome entry sites (IRES) and/or self-cleaving peptides. Exemplary self-cleaving peptides include T2A, P2A, E2A and F2A self-cleaving peptides. In some embodiments, the T2A self-cleaving peptide comprises a sequence of EGRGSLLTCGDVEENPGP (SEQ ID NO: 261). In some embodiments, the P2A self-cleaving peptide comprises a sequence of ATNFSLLKQAGDVEENPGP (SEQ ID NO: 188). In some embodiments, the E2A self-cleaving peptide comprises a sequence of QCTNYALLKLAGDVESNPGP (SEQ ID NO: 262). In some embodiments, the F2A self-cleaving peptide comprises a sequence of VKQTLNFDLLKLAGDVESNPGP (SEQ ID NO: 263). In some embodiments, the P2A self-cleaving peptide comprises a sequence of VKQTLNFDLLKLAGDVESNPGP (SEQ ID NO: 21905).

[0680] The disclosure provides polynucleotides encoding the gene editing systems described herein.

[0681] In some embodiments, the vector is an expression vector, i.e. for the expression of the fusion protein in a suitable cell.

[0682] Vectors derived from retroviruses such as the lentivirus are suitable tools to achieve long-term gene transfer since they allow long-term, stable integration of a transgene and its propagation in daughter cells. Lentiviral vectors have the added advantage over vectors derived from onco-retroviruses such as murine leukemia viruses in that they can transduce non-proliferating cells, such as hepatocytes. They also have the added advantage of low immunogenicity.

[0683] The expression of natural or synthetic nucleic acids encoding fusion proteins is typically achieved by operably linking a nucleic acid encoding the fusion protein or portions thereof to a promoter, and incorporating the construct into an expression vector. The vectors can be suitable for replication and integration eukaryotes. Typical cloning vectors contain transcription and translation terminators, initiation sequences, and promoters useful for regulation of the expression of the desired nucleic acid sequence.

[0684] The polynucleotides encoding the fusion proteins can be cloned into a number of types of vectors. For example, the polynucleotides can be cloned into a vector including, but not limited to a plasmid, a phagemid, a phage derivative, an animal virus, and a cosmid. Vectors of particular interest include expression vectors, replication vectors, probe generation vectors, and sequencing vectors.

[0685] Further, the expression vector may be provided to cells, such as immune cells, in the form of a viral vector. Viral vector technology is well known in the art and is described, for example, in Sambrook et al. (2001, Molecular Cloning: A Laboratory Manual, Cold Spring Harbor Laboratory, New York), and in other virology and molecular biology manuals. Viruses, which are useful as vectors include, but are not limited to, retroviruses, adenoviruses, adeno-associated viruses, herpes viruses, and lentiviruses. In general, a suitable vector contains an origin of replication function in at least one organism, a promoter sequence, convenient restriction endonuclease sites, and one or more selectable markers, (e.g., WO 01/96584; WO 01/29058; and U.S. Pat. No. 6,326,193).

[0686] A number of viral based systems have been developed for gene transfer into mammalian cells. For example, retroviruses provide a convenient platform for gene delivery systems. A selected gene can be inserted into a vector and packaged in retroviral particles using techniques known in the art. The recombinant virus can then be isolated and delivered to cells of the subject either in vivo or ex vivo. A number of retroviral systems are known in the art. In some embodiments, adenovirus vectors are used. A number of adenovirus vectors are known in the art. In one embodiment, lentivirus vectors are used.

[0687] Additional promoter elements, e.g., enhancers, regulate the frequency of transcriptional initiation. Typically, these are located in the region 30-110 basepairs (bp) upstream of the start site, although a number of promoters have recently been shown to contain functional elements downstream of the start site as well. The spacing between promoter elements frequently is flexible, so that promoter function is preserved when elements are inverted or moved relative to one another. In the thymidine kinase (tk) promoter, the spacing between promoter elements can be increased to 50 bp apart before activity begins to decline. Depending on the promoter, it appears that individual elements can function either cooperatively or independently to activate transcription.

[0688] One example of a suitable promoter is the immediate early cytomegalovirus (CMV) promoter sequence. This promoter sequence is a strong constitutive promoter sequence capable of driving high levels of expression of any polynucleotide sequence operatively linked thereto. Another example of a suitable promoter is Elongation Growth Factor-1α (EF-1α, Ef1a). However, other constitutive promoter sequences may also be used, including, but not limited to the simian virus 40 (SV40) early promoter, mouse mammary tumor virus (MMTV), human immunodeficiency virus (HIV) long terminal repeat (LTR) promoter, MoMuLV promoter, an avian leukemia virus promoter, an Epstein-Barr virus immediate early promoter, a Rous sarcoma virus promoter, as well as human gene promoters such as, but not limited to, the actin promoter, the myosin promoter, the hemoglobin promoter, and the creatine kinase promoter. Further, the invention should not be limited to the use of constitutive promoters. Inducible promoters are also contemplated as part of the invention. The use of an inducible promoter provides a molecular switch capable of turning on expression of the polynucleotide sequence which it is operatively linked when such expression is desired, or turning off the expression when expression is not desired. Examples of inducible promoters include, but are not limited to a metallothionine promoter, a glucocorticoid promoter, a progesterone promoter, and a tetracycline promoter.

[0689] In order to assess the expression of a fusion protein, the expression vector to be introduced into a cell can also contain either a selectable marker gene or a reporter gene or both to facilitate identification and selection of expressing cells from the population of cells sought to be transfected or infected through viral vectors. In other aspects, the selectable marker may be carried on a separate piece of DNA and used in a co-transfection procedure. Both selectable markers and reporter genes may be flanked with appropriate regulatory sequences to enable expression in the host cells. Useful selectable markers include, for example, antibiotic-resistance genes, such as neo and the like.

[0690] Reporter genes are used for identifying potentially transfected or transduced cells and for evaluating the functionality of regulatory sequences. In general, a reporter gene is a gene that is not present in or expressed by the recipient organism or tissue and that encodes a polypeptide whose expression is manifested by some easily detectable property, e.g., enzymatic activity. Expression of the reporter gene is assayed at a suitable time after the DNA has been introduced into the recipient cells. Suitable reporter genes may include genes encoding luciferase, beta-galactosidase, chloramphenicol acetyl transferase, secreted alkaline phosphatase, or the green fluorescent protein gene (e.g., Ui-Tei et al., 2000 FEBS Letters 479: 79-82). Suitable expression systems are well known and may be prepared using known techniques or obtained commercially. In general, the construct with the minimal 5′ flanking region showing the highest level of expression of reporter gene is identified as the promoter. Such promoter regions may be linked to a reporter gene and used to evaluate agents for the ability to modulate promoter-driven transcription.

[0691] Methods of introducing and expressing genes into a cell are known in the art. In the context of an expression vector, the vector can be readily introduced into a host cell, e.g., mammalian, bacterial, yeast, or insect cell by any method in the art. For example, the expression vector can be transferred into a host cell by physical, chemical, or biological means.

[0692] Physical methods for introducing a polynucleotide into a host cell include calcium phosphate precipitation, lipofection, particle bombardment, microinjection, electroporation, and the like. Methods for producing cells comprising vectors and/or exogenous nucleic acids are well-known in the art. See, for example, Sambrook et al. (2001, Molecular Cloning: A Laboratory Manual, Cold Spring Harbor Laboratory, New York). One method for the introduction of a polynucleotide into a host cell is calcium phosphate transfection.

[0693] Biological methods for introducing a polynucleotide of interest into a host cell include the use of DNA and RNA vectors. Viral vectors, and especially retroviral vectors, have become the most widely used method for inserting genes into mammalian, e.g., human cells. Other viral vectors can be derived from lentivirus, poxviruses, herpes simplex virus I, adenoviruses and adeno-associated viruses, and the like. See, for example, U.S. Pat. Nos. 5,350,674 and 5,585,362.

[0694] Chemical means for introducing a polynucleotide into a host cell include colloidal dispersion systems, such as macromolecule complexes, nanocapsules, microspheres, beads, and lipid-based systems including oil-in-water emulsions, micelles, mixed micelles, and liposomes. An exemplary colloidal system for use as a delivery vehicle in vitro and in vivo is a liposome (e.g., an artificial membrane vesicle).

[0695] Regardless of the method used to introduce exogenous nucleic acids into a host cell or otherwise expose a cell to the inhibitor of the present invention, in order to confirm the presence of the recombinant DNA sequence in the host cell, a variety of assays may be performed. Such assays include, for example, “molecular biological” assays well known to those of skill in the art, such as Southern and Northern blotting, RT-PCR and PCR; “biochemical” assays, such as detecting the presence or absence of a particular peptide, e.g., by immunological means (ELISAs and Western blots) or by assays described herein to identify agents falling within the scope of the invention.

### Immune Cells

[0696] Provided herein are immune cells comprising the polynucleotides, vectors, fusion proteins and engineered receptors described herein.

[0697] Provided herein are immune cells edited using the gene editing systems described herein.

[0698] In some embodiments, the immune cells comprise the polynucleotides, vectors, fusion proteins or engineered receptors of the disclosure.

[0699] Provided herein are immune cells comprising the interfering RNAs, polynucleotides, vectors, fusion proteins and engineered receptors described herein.

[0700] Provided herein are immune cells comprising the interfering RNAs, e.g. shRNAS, described herein. In some embodiments, the immune cells comprise the interfering RNAs. polynucleotides, vectors, fusion proteins or engineered receptors of the disclosure.

[0701] In some embodiments, the immune cell is a T cell, B cell, or Natural Killer (NK) cell. In some embodiments, the immune cell is autologous to a subject. In some embodiments, the immune cell is allogeneic to a subject. In some embodiments, the immune cell is non-natural.

[0702] In some embodiments, the immune cell is isolated. In some embodiments, the immune cell is for use as a medicament. In some embodiments, the medicament is for the treatment of cancer in a subject in need thereof.

[0703] In some embodiments, the immune cell comprises an inhibitory receptor comprising a ligand binding domain specific to a class I major histocompatibility complex (MHC-I) molecule, or a peptide-MHC complex thereof wherein expression and/or function of a human leukocyte antigen (HLA) polypeptide, or an allele thereof, in said immune cell has been reduced or eliminated. In some embodiments, the HLA allele is an HLA-A, HLA-B, HLA-C, and/or HLA-E allele. In some embodiments, the HLA-A allele is selected from HLA-A*02, HLA-A*02:01, HLA-A*02:01:01, and HLA-A*02:01:01:01. In some embodiments, the HLA-A allele is HLA-A*02.

[0704] In some embodiments, the immune cell comprises an interfering RNA, comprising a sequence complementary to a sequence of a HLA-A*02 mRNA. In some embodiments, the interfering RNA is capable of inducing RNAi-mediated degradation of the HLA-A*02 mRNA. In some embodiments, the interfering RNA is a short hairpin RNA (shRNA).

[0705] In some embodiments, the shRNA comprises a first sequence, having from 5′ to 3′ end a sequence complementary to the HLA-A*02 mRNA; and a second sequence, having from 5′ to 3′ end a sequence complementary to the first sequence, wherein the first sequence and second sequence form the shRNA.

[0706] In some embodiments, the first sequences is 18, 19, 20, 21, or 22 nucleotides. In some embodiments, the first sequence is complementary to a sequence selected from SEQ ID NOs: 8476-16870. In some embodiments, the first sequence has GC content greater than or equal to 25% and less than 60%. In some embodiments, the first sequence is complementary to a sequence selected from SEQ ID NOs: 8476-12066. In some embodiments, the first sequence does not comprise four nucleotides of the same base or a run of seven C or G nucleotide bases. In some embodiments, the first sequence is complementary to a sequence selected from SEQ ID NOs: 8476-11584. In some embodiments, the first sequence is complementary to a sequence selected from SEQ ID NOs: 8476-8754. In some embodiments, the first sequence is complementary to a sequence selected from SEQ ID NOs: 8476-8561.

[0707] In some embodiments, the first and second sequence are present on a single stranded polynucleotide, wherein the first sequence and second sequence are separated by 4, 5, 6, 7, 8, 9, 10, 11, 12, 13, 14, or 15 nucleotides, wherein the 4, 5, 6, 7, 8, 9, 10, 11, 12, 13, 14, or 15 nucleotides form a loop region in the shRNA. In some embodiments, the loop region comprises a sequence selected from SEQ ID NOs: 16872-16884 and 16895.

[0708] In some embodiments, the shRNA further comprises a 5′ flank sequence and a 3′ flank sequence, wherein the 5′ flank sequence is joined to the 5′ end of the first sequence, and wherein the 3′ flank sequence is joined to the 3′ end of the second sequence. In some embodiments, the 5′ flank sequence is selected from SEQ ID NO: 16885-16887. In some embodiments, the 3′ flank sequence is selected from SEQ ID NO: 16888, 16889, and 16896.

[0709] As used herein, the term “immune cell” refers to a cell involved in the innate or adaptive (acquired) immune systems. Exemplary innate immune cells include phagocytic cells such as neutrophils, monocytes and macrophages, Natural Killer (NK) cells, polymophonuclear leukocytes such as neutrophils eosinophils and basophils and mononuclear cells such as monocytes, macrophages and mast cells. Immune cells with roles in acquired immunity include lymphocytes such as T-cells and B-cells.

[0710] As used herein, a “T-cell” refers to a type of lymphocyte that originates from a bone marrow precursor that develops in the thymus gland. There are several distinct types of T-cells which develop upon migration to the thymus, which include, helper CD4+ T-cells, cytotoxic CD8+ T cells, memory T cells, regulatory CD4+ T-cells and stem memory T-cells. Different types of T-cells can be distinguished by the ordinarily skilled artisan based on their expression of markers. Methods of distinguishing between T-cell types will be readily apparent to the ordinarily skilled artisan.

[0711] In some embodiments, the engineered immune cell expresses the first and second receptors at a ratio of about 100:1 to 1:100 of first receptor to second receptor. In some embodiments, the engineered immune cell expresses the first and second receptors at a ratio of about 50:1 to 1:50 of first receptor to second receptor. In some embodiments, the engineered immune cell expresses the first and second receptors at a ratio of about 10:1 to 1:10 of first receptor to second receptor. In some embodiments, the engineered immune cell expresses the first and second receptors at a ratio of about 5:1 to 1:5 of first receptor to second receptor. In some embodiments, the engineered immune cell expresses the first and second receptors at a ratio of about 3:1 to 1:3 of first receptor to second receptor. In some embodiments, the engineered immune cell expresses the first and second receptors at a ratio of about 2:1 to 1:2 of first receptor to second receptor. In some embodiments, the engineered immune cell expresses the first and second receptors at a ratio of about 1:1.

[0712] In some embodiments, the engineered immune cell comprising the engineered receptors of the disclosure is a T cell. In some embodiments, the T cell is an effector T cell or a regulatory T cell.

[0713] Methods transforming populations of immune cells, such as T cells, with the vectors of the instant disclosure will be readily apparent to the person of ordinary skill in the art. For example, CD3+ T cells can be isolated from PBMCs using a CD3+ T cell negative isolation kit (Miltenyi), according to manufacturer's instructions. T cells can be cultured at a density of 1×10\hat{ }6 cells/mL in X-Vivo 15 media supplemented with 5% human A/B serum and 1% Pen/strep in the presence of CD3/28 Dynabeads (1:1 cell to bead ratio) and 300 Units/mL of IL-2 (Miltenyi). After 2 days, T cells can be transduced with viral vectors, such as lentiviral vectors using methods known in the art. In some embodiments, the viral vector is transduced at a multiplicity of infection (MOI) of 5. Cells can then be cultured in IL-2 or other cytokines such as combinations of IL-7/15/21 for an additional 5 days prior to enrichment. Methods of isolating and culturing other populations of immune cells, such as B cells, or other populations of T cells, will be readily apparent to the person of ordinary skill in the art. Although this method outlines a potential approach it should be noted that these methodologies are rapidly evolving. For example excellent viral transduction of peripheral blood mononuclear cells can be achieved after 5 days of growth to generate a >99% CD3+ highly transduced cell population.

[0714] Additional methods of transforming populations of immune cells, such as T cells, include transfection. For example, immune cells, such as T cells, can be transfected with nucleic acids encoding guide RNAs (gRNAs) or shRNAs under control of a promoter, or directly with the gRNA itself. Alternatively, immune cells can be transfected with the gRNA in complex with a CRISPR/Cas protein as a ribonucleoprotein complex. As a still further alternative, immune cells can be transfected with gRNA, or a nucleic acid encoding a gRNA, and CRISPR/Cas protein or a nucleic acid encoding a CRISPR/Cas protein. Methods of immune cell transfection will be known to persons of skill in the art, and include, inter alia, electroporation methods such as nucleofection and chemical based methods such as through the use of cationic lipid or calcium phosphate reagents.

[0715] Methods of activating and culturing populations of T cells comprising the engineered TCRs, CARs, fusion proteins or vectors encoding the fusion proteins of the instant disclosure, will be readily apparent to the person of ordinary skill in the art.

[0716] Whether prior to or after genetic modification of T cells to express an engineered TCR, the T cells can be activated and expanded generally using methods as described, for example, in U.S. Pat. Nos. 6,352,694; 6,534,055; 6,905,680; 6,692,964; 5,858,358; 6,887,466; 6,905,681; 7,144,575; 7,067,318; 7,172,869; 7,232,566; 7,175,843; 5,883,223; 6,905,874; 6,797,514; 6,867,041, 10040846; and U.S. Pat. Appl. Pub. No. 2006/0121005.

[0717] In some embodiments, T cells of the instant disclosure are expanded and activated in vitro. Generally, the T cells of the instant disclosure are expanded in vitro by contact with a surface having attached thereto an agent that stimulates a CD3/TCR complex associated signal and a ligand that stimulates a co-stimulatory molecule on the surface of the T cells. In particular, T cell populations may be stimulated as described herein, such as by contact with an anti-CD3 antibody. For co-stimulation of an accessory molecule on the surface of the T cells, a ligand that binds the accessory molecule is used. For example, a population of T cells can be contacted with an anti-CD3 antibody and an anti-CD28 antibody, under conditions appropriate for stimulating proliferation of the T cells. To stimulate proliferation of either CD4+ T cells or CD8+ T cells, an anti-CD3 antibody and an anti-CD28 antibody can be used. Examples of an anti-CD28 antibody include 9.3, B-T3, XR-CD28 (Diaclone, Besancon, France) can be used as can other methods commonly known in the art (Berg et al., Transplant Proc. 30(8):3975-3977, 1998; Haanen et al., J. Exp. Med. 190(9):13191328, 1999; Garland et al., J. Immunol Meth. 227(1-2):53-63, 1999).

[0718] In some embodiments, the primary stimulatory signal and the co-stimulatory signal for the T cell may be provided by different protocols. For example, the agents providing each signal may be in solution or coupled to a surface. When coupled to a surface, the agents may be coupled to the same surface (i.e., in “cis” formation) or to separate surfaces (i.e., in “trans” formation). Alternatively, one agent may be coupled to a surface and the other agent in solution. In some embodiments, the agent providing the co-stimulatory signal is bound to a cell surface and the agent providing the primary activation signal is in solution or coupled to a surface. In certain embodiments, both agents can be in solution. In another embodiment, the agents may be in soluble form, and then cross-linked to a surface, such as a cell expressing Fc receptors or an antibody or other binding agent which will bind to the agents. In this regard, see for example, U.S. Patent Application Publication Nos. 20040101519 and 20060034810 for artificial antigen presenting cells (aAPCs) that are contemplated for use in activating and expanding T cells in the present invention.

[0719] In some embodiments, the two agents are immobilized on beads, either on the same bead, i.e., “cis,” or to separate beads, i.e., “trans.” By way of example, the agent providing the primary activation signal is an anti-CD3 antibody or an antigen-binding fragment thereof and the agent providing the co-stimulatory signal is an anti-CD28 antibody or antigen-binding fragment thereof; and both agents are co-immobilized to the same bead in equivalent molecular amounts. In one embodiment, a 1:1 ratio of each antibody bound to the beads for CD4+ T cell expansion and T cell growth is used. In some embodiments, the ratio of CD3:CD28 antibody bound to the beads ranges from 100:1 to 1:100 and all integer values there between. In one aspect of the present invention, more anti-CD28 antibody is bound to the particles than anti-CD3 antibody, i.e., the ratio of CD3:CD28 is less than one. In certain embodiments of the invention, the ratio of anti CD28 antibody to anti CD3 antibody bound to the beads is greater than 2:1.

[0720] Ratios of particles to cells from 1:500 to 500:1 and any integer values in between may be used to stimulate T cells or other target cells. As those of ordinary skill in the art can readily appreciate, the ratio of particles to cells may depend on particle size relative to the target cell. For example, small sized beads could only bind a few cells, while larger beads could bind many. In certain embodiments the ratio of cells to particles ranges from 1:100 to 100:1 and any integer values in-between and in further embodiments the ratio comprises 1:9 to 9:1 and any integer values in between, can also be used to stimulate T cells. In some embodiments, a ratio of 1:1 cells to beads is used. One of skill in the art will appreciate that a variety of other ratios may be suitable for use in the present invention. In particular, ratios will vary depending on particle size and on cell size and type.

[0721] In further embodiments of the present invention, the cells, such as T cells, are combined with agent-coated beads, the beads and the cells are subsequently separated, and then the cells are cultured. In an alternative embodiment, prior to culture, the agent-coated beads and cells are not separated but are cultured together. In a further embodiment, the beads and cells are first concentrated by application of a force, such as a magnetic force, resulting in increased ligation of cell surface markers, thereby inducing cell stimulation.

[0722] By way of example, cell surface proteins may be ligated by allowing paramagnetic beads to which anti-CD3ξ and anti-CD28 are attached to contact the T cells. In one embodiment the cells (for example, CD4+ T cells) and beads (for example, DYNABEADS CD3/CD28 T paramagnetic beads at a ratio of 1:1) are combined in a buffer. Again, those of ordinary skill in the art can readily appreciate any cell concentration may be used. In certain embodiments, it may be desirable to significantly decrease the volume in which particles and cells are mixed together (i.e., increase the concentration of cells), to ensure maximum contact of cells and particles. For example, in one embodiment, a concentration of about 2 billion cells/ml is used. In another embodiment, greater than 100 million cells/ml is used. In a further embodiment, a concentration of cells of 10, 15, 20, 25, 30, 35, 40, 45, or 50 million cells/ml is used. In yet another embodiment, a concentration of cells from 75, 80, 85, 90, 95, or 100 million cells/ml is used. In further embodiments, concentrations of 125 or 150 million cells/ml can be used. In some embodiments, cells that are cultured at a density of 1×10⁶ cells/mL are used.

[0723] In some embodiments, the mixture may be cultured for several hours (about 3 hours) to about 14 days or any hourly integer value in between. In another embodiment, the beads and T cells are cultured together for 2-3 days. Conditions appropriate for T cell culture include an appropriate media (e.g., Minimal Essential Media or RPMI Media 1640 or, X-vivo 15, (Lonza)) that may contain factors necessary for proliferation and viability, including serum (e.g., fetal bovine or human serum), interleukin-2 (IL-2), insulin, IFN-γ, IL-4, IL-7, GM-CSF, IL-10, IL-12, IL-15, TGFβ, and TNF-α or any other additives for the growth of cells known to the skilled artisan. Other additives for the growth of cells include, but are not limited to, surfactant, plasmanate, and reducing agents such as N-acetyl-cysteine and 2-mercaptoethanol. Media can include RPMI 1640, AIM-V, DMEM, MEM, α-MEM, F-12, X-Vivo 15, and X-Vivo 20, Optimizer, with added amino acids, sodium pyruvate, and vitamins, either serum-free or supplemented with an appropriate amount of serum (or plasma) or a defined set of hormones, and/or an amount of cytokine(s) sufficient for the growth and expansion of T cells. In some embodiments, the media comprises X-VIVO-15 media supplemented with 5% human A/B serum, 1% penicillin/streptomycin (pen/strep) and 300 Units/ml of IL-2 (Miltenyi).

[0724] The T cells are maintained under conditions necessary to support growth, for example, an appropriate temperature (e.g., 37° C.) and atmosphere (e.g., air plus 5% CO2).

[0725] In some embodiments, the T cells comprising engineered receptors of the disclosure are autologous. In some embodiments, the T cells comprising engineered receptors of the disclosure are allogeneic. Prior to expansion and genetic modification, a source of T cells is obtained from a subject. Immune cells such as T cells can be obtained from a number of sources, including peripheral blood mononuclear cells (PBMCs), bone marrow, lymph node tissue, cord blood, thymus tissue, tissue from a site of infection, ascites, pleural effusion, spleen tissue, and tumors. In certain embodiments of the present invention, any number of T cell lines available in the art, may be used. In certain embodiments of the present invention, T cells can be obtained from a unit of blood collected from a subject using any number of techniques known to the skilled artisan, such as Ficoll™ separation.

[0726] In some embodiments, cells from the circulating blood of an individual are obtained by apheresis. The apheresis product typically contains lymphocytes, including T cells, monocytes, granulocytes, B cells, other nucleated white blood cells, red blood cells, and platelets. In some embodiments, the cells collected by apheresis may be washed to remove the plasma fraction and to place the cells in an appropriate buffer or media for subsequent processing steps. In some embodiments, the cells are washed with phosphate buffered saline (PBS). In alternative embodiments, the wash solution lacks calcium and may lack magnesium or may lack many if not all divalent cations. As those of ordinary skill in the art would readily appreciate a washing step may be accomplished by methods known to those in the art, such as by using a semi-automated “flow-through” centrifuge (for example, the Cobe 2991 cell processor, the Baxter CytoMate, or the Haemonetics Cell Saver 5) according to the manufacturer's instructions. After washing, the cells may be resuspended in a variety of biocompatible buffers, such as, for example, Ca2+-free, Mg2+-free PBS, PlasmaLyte A, or other saline solution with or without buffer. Alternatively, the undesirable components of the apheresis sample may be removed and the cells directly resuspended in culture media.

[0727] In some embodiments, immune cells such as T cells are isolated from peripheral blood lymphocytes by lysing the red blood cells and depleting the monocytes, for example, by centrifugation through a PERCOLL™ gradient or by counterflow centrifugal elutriation. Specific subpopulations of immune cells, such as T cells, B cells, or CD4+ T cells can be further isolated by positive or negative selection techniques. For example, in one embodiment, T cells are isolated by incubation with anti-CD4-conjugated beads, for a time period sufficient for positive selection of the desired T cells.

[0728] Enrichment of an immune cell population, such as a T cell population, by negative selection can be accomplished with a combination of antibodies directed to surface markers unique to the negatively selected cells. One method is cell sorting and/or selection via negative magnetic immune-adherence or flow cytometry that uses a cocktail of monoclonal antibodies directed to cell surface markers present on the cells negatively selected. For example, to enrich for CD4+ cells by negative selection, a monoclonal antibody cocktail typically includes antibodies to CD 14, CD20, CD 11b, CD 16, HLA-DR, and CD8.

[0729] In some embodiments, an immune cell population, such as a T cell population, is depleted of NK cells. NK cells can be depleted through any methods known in the art. For example, NK cells can be depleted using antibodies, such as anti-CD56 antibodies, that, when bound to beads, can be used to bind to and isolate CD56 positive NK cells from a mixture of immune cell types. NK cell isolation kits are available commercially, and include, for example, the FastStep NK Cell Isolation kit from Creative Biolabs, the NK Cell Isolation kit from Miltenyi Biotec, and the EasySep Human NK Cell Isolation kit from StemCell Technologies. An exemplary NK cell depletion protocol includes incubating peripheral blood mononuclear cells (PBMCs) with microbeads coated with anti-human CD56 (available from, e.g., Miltenyi Biotec, catalog number #130-050-401, or #170-076-713 if CliniMACS CD56 GMP Microbeads) according to the manufacturer's instructions. Anti-CD56 bound cells are then separated on an AutoMACS Pro, CliniMACS Prodigy (Miltyenyi Biotec), or equivalent. The negative fraction, i.e. the fraction not containing anti-CD56 bound cells, is collected and incubated with microbeads suitable to isolate T cells. Suitable microbeads for T cells isolation include anti-human CD4 and CD8 microbeads (Miltyenyi Biotec #130-045-101 and 130-045-201 respectively) or CliniMACS CD4 GMP and CD8 MicroBeads (Miltyenyi Biotec #170-076-702 and 170-076-703). CD4 and/or CD8 positive T cells are then separated on an AutoMACS Pro or CliniMACS prodigy, or equivalent.

[0730] For isolation of a desired population of immune cells by positive or negative selection, the concentration of cells and surface (e.g., particles such as beads) can be varied. In certain embodiments, it may be desirable to significantly decrease the volume in which beads and cells are mixed together (i.e., increase the concentration of cells), to ensure maximum contact of cells and beads.

[0731] In some embodiments, the cells may be incubated on a rotator for varying lengths of time at varying speeds at either 2-10° C. or at room temperature.

[0732] T cells for stimulation, or PBMCs from which immune cells such as T cells are isolated, can also be frozen after a washing step. Wishing not to be bound by theory, the freeze and subsequent thaw step provides a more uniform product by removing granulocytes and to some extent monocytes in the cell population. After the washing step that removes plasma and platelets, the cells may be suspended in a freezing solution. While many freezing solutions and parameters are known in the art and will be useful in this context, one method involves using PBS containing 20% DMSO and 8% human serum albumin, or culture media containing 10% Dextran 40 and 5% Dextrose, 20% Human Serum Albumin and 7.5% DMSO, or 31.25% Plasmalyte-A, 31.25% Dextrose 5%, 0.45% NaCl, 10% Dextran 40 and 5% Dextrose, 20% Human Serum Albumin, and 7.5% DMSO or other suitable cell freezing media containing for example, Hespan and PlasmaLyte A, the cells then are frozen to −80° C. at a rate of 1° per minute and stored in the vapor phase of a liquid nitrogen storage tank. Other methods of controlled freezing may be used as well as uncontrolled freezing immediately at −20° C. or in liquid nitrogen.

### Pharmaceutical Compositions

[0733] The disclosure provides pharmaceutical compositions comprising immune cells edited using the gene editing systems of the disclosure, and comprising the engineered receptors of the disclosure and a pharmaceutically acceptable diluent, carrier or excipient.

[0734] In some embodiments, the immune cell comprises an inhibitory receptor comprising a ligand binding domain specific to a class I major histocompatibility complex (MHC-I) molecule, or a peptide-MHC complex thereof; wherein expression and/or function of human leukocyte antigen (HLA) in said immune cell has been reduced or eliminated. In some embodiments, the immune cell comprises an interfering RNA, comprising a sequence complementary to a sequence of a HLA-A*02 mRNA. In some embodiments, the interfering RNA is capable of inducing RNAi-mediated degradation of the HLA-A*02 mRNA. In some embodiments, the interfering RNA is a short hairpin RNA (shRNA) as described herein. In some embodiments, the immune cell further comprises an activator receptor as described herein.

[0735] Such compositions may comprise buffers such as neutral buffered saline, phosphate buffered saline and the like; carbohydrates such as glucose, mannose, sucrose or dextrans, mannitol; proteins; polypeptides or amino acids such as glycine; antioxidants; chelating agents such as EDTA or glutathione; and preservatives.

[0736] Provided herein are methods of producing an immune cell with reduced autocrine binding/signaling comprising transducing and/or transfecting the immune cell with a vector described herein. In some embodiments, the method comprises transducing the immune cell with a first vector comprising a sequence encoding an activator receptor and a second vector comprising a sequence encoding an inhibitory receptor, thereby producing an immune cell expressing the activator and inhibitory receptors. In some embodiments, the inhibitory receptor specifically binds to an HLA-A*02 pMHC antigen and the target gene comprises HLA-A*02. In some embodiments, prior to the transducing and/or transfecting steps, the immune cell comprises a polynucleotide or vector encoding interfering RNA targeting a HLA-A*02 mRNA.

### Methods of Treating Disease

[0737] Provided herein are methods of treating a subject in need thereof, comprising administering to the subject a therapeutically effective amount of a composition comprising allogeneic immune cells comprising the engineered receptors and gene editing modifications of the disclosure. The immune cells express both engineered receptors in the same cell. As used herein, the term “allogeneic” refers to any material derived from a different animal of the same species as the individual to whom the material is introduced. Two or more individuals are said to be allogeneic to one another when the genes at one or more loci are not identical. In some aspects, allogeneic material from individuals of the same species may be sufficiently unlike genetically to interact antigenically. For example, cells of the same species that differ genetically are allogerieic.

[0738] In some embodiments, the method of treating a subject comprises providing immune cells from a subject suffering from or at risk for cancer or a hematological malignancy; transducing the immune cell with a vector comprising a sequence encoding a nucleic acid-guided endonuclease, thereby expressing the nuclease; transfecting the immune cell with at least one guide nucleic acid (gNA) complementary to a target sequence of a target gene selected from the group consisting of HLA-A, HLA-B, HLA-C, an allele thereof, or a combination thereof, wherein the gNA bind to the target sequence and the nuclease cleaves the target sequence, thereby producing a modified target gene; and administering the immune cell to the subject.

[0739] Provided herein are methods of treating a subject in need thereof, comprising administering to the subject a therapeutically effective amount of a composition comprising immune cells comprising the engineered receptors and having reduced or eliminated expression and/or function of HLA. In some embodiments, the immune cell comprises an interfering RNA (e.g. an shRNA), polynucleotide, vector, fusion protein, engineered receptor (e.g. an inhibitory receptor) of the disclosure.

[0740] In some embodiments, the method of treating a subject in need thereof comprises providing immune cells from a subject suffering from or at risk for cancer or a hematological malignancy; transducing the immune cell with the vectors described herein; and administering the immune cell to the subject.

[0741] Provided herein are methods of manufacturing a composition comprising immune cells with reduced autocrine binding/signaling comprising providing immune cells from a subject suffering from or at risk for cancer or a hematological malignancy; and transducing or transfecting the immune cell with one or more vectors described herein. In some embodiments, the vector encodes an interfering RNA targeting HLA-A*02 mRNA. In some embodiments, the vector encodes an engineered receptor (e.g. an inhibitory receptor that specifically binds to HLA-A*02 pMHC antigen and the target gene comprises HLA-A*02. In some embodiments, prior to the transducing and/or transfecting steps, the immune cell comprises a polynucleotide encoding activator and/or inhibitory receptors. In some embodiments, the method comprises transducing the immune cell with a first vector comprising a sequence encoding the activator receptor and a second vector comprising a sequence encoding the inhibitory receptor, thereby producing an immune cell expressing the activator and inhibitory receptors.

[0742] The current method for adoptive cell therapy using autologous cells includes isolating immune cells from patient blood, performing a series of modifications on the isolated cells, and administering the cells to a patient (Papathanasiou et al. Cancer Gene Therapy. 27:799-809 (2020)). Providing immune cells from a subject suffering from or at risk for cancer or a hematological malignancy requires isolation of immune cell from the patient's blood, and can be accomplished through methods known in the art, for example, by leukapheresis. During leukapheresis, blood from a subject is extracted and the peripheral blood mononuclear cells (PBMCs) are separated, and the remainder of the blood is returned to the subject's circulation. The PBMCs are stored either frozen or cryopreserved as a sample of immune cells and provided for further processing steps, such as, e.g. the modifications described herein.

[0743] In some embodiments, the method of treating a subject described herein comprises modifications to immune cells from the subject comprising a series of modifications comprising enrichment, activation, genetic modification, expansion, formulation, and cryopreservation.

[0744] The disclosure provides enrichment steps that can be, for example, washing and fractionating methods known in the art for preparation of subject PBMCs for downstream procedures, e.g. the modifications described herein. For example, without limitation, methods can include devices to remove gross red blood cells and platelet contaminants, systems for size-based cell fractionation for the depletion of monocytes and the isolation of lymphocytes, and/or systems that allow the enrichment of specific subsets of T cells, such as, e.g. CD4+, CD8+, CD25+, or CD62L+ T cells. Following the enrichment steps, a target sub-population of immune cells will be isolated from the subject PMBCs for further processing. Those skilled in the art will appreciate that enrichment steps, as provided herein, may also encompass any newly discovered method, device, reagent or combination thereof.

[0745] The disclosure provides activation steps that can be any method known in the art to induce activation of immune cells, e.g. T cells, required for their ex vivo expansion. Immune cell activation can be achieved, for example, by culturing the subject immune cells in the presence of dendritic cells, culturing the subject immune cells in the presence of artificial antigen-presenting cells (AAPCs), or culturing the immune cells in the presence of irradiated K562-derived AAPCs. Other methods for activating subject immune cells can be, for example, culturing the immune cells in the presence of isolated activating factors and compositions, e.g. beads, surfaces, or particles functionalized with activating factors. Activating factors can include, for example, antibodies, e.g. anti-CD3 and/or anti-CD28 antibodies. Activating factors can also be, for example, cytokines, e.g. interleukin (IL)-2 or IL-21. Activating factors can also be costimulatory molecules, such as, for example, CD40, CD40L, CD70, CD80, CD83, CD86, CD137L, ICOSL, GITRL, and CD134L. Those skilled in the art will appreciate that activating factors, as provided herein, may also encompass any newly discovered activating factor, reagent, composition, or combination thereof that can activate immune cells.

[0746] The disclosure provides genetic modification steps for modifying the subject immune cells. In some embodiments, the genetic modification comprises transducing the immune cell with a vector comprising a sequence encoding a nucleic acid-guided endonuclease, thereby expressing the nuclease; transfecting the immune cell with at least one guide nucleic acid (gNA) complementary to a target sequence of a target gene selected from the group consisting of HLA-A, HLA-B, HLA-C, or an allele thereof, including all alleles of HLA-A, B, and/or C, wherein the gNA bind to the target sequence and the nuclease cleaves the target sequence, thereby producing a modified target gene or genes; and administering the immune cell to the subject. The gNA can be a guide nucleic acid described herein. The genetic modification steps can also be transduction of the immune cell with an engineered receptor. In some embodiments, the method comprises transducing the immune cell with a first vector comprising a sequence encoding the activator receptor and a second vector comprising a sequence encoding the inhibitory receptor, thereby producing an immune cell expressing the activator and inhibitory receptors.

[0747] The disclosure provides expansion steps for the genetically modified subject immune cells. Genetically modified subject immune cells can be expanded in any immune cell expansion system known in the art to generate therapeutic doses of immune cells for administration. For example, bioreactor bags for use in a system comprising controller pumps, and probes that allow for automatic feeding and waste removal can be used for immune cell expansion. Cell culture flasks with gas-permeable membranes at the base may be used for immune cell expansion. Any such system known in the art that enables expansion of immune cells for clinical use is encompassed by the expansion step provided herein. Immune cells are expanded in culture systems in media formulated specifically for expansion. Expansion can also be facilitated by culturing the immune cell of the disclosure in the presence of activation factors as described herein. Those skilled in the art will appreciate that expansion steps, as provided herein, may also encompass any newly discovered culture systems, media, or activating factors that can be used to expand immune cells.

[0748] The disclosure provides formulation and cryopreservation steps for the expanded genetically modified subject immune cells. Formulation steps provided include, for example, washing away excess components used in the preparation and expansion of immune cells of the methods of treatment described herein. Any pharmaceutically acceptable formulation medium or wash buffer compatible with immune cell known in the art may be used to wash, dilute/concentration immune cells, and prepare doses for administration. Formulation medium can be acceptable for administration of the immune cells, such as, for example crystalloid solutions for intravenous infusion. Cryopreservation can optionally be used to store immune cells long-term. Cryopreservation can be achieved using known methods in the art, including for example, storing cells in a cryopreservation medium containing cryopreservation components. Cryopreservation components can include, for example, dimethyl sulfoxide or glycerol. Immune cells stored in cryopreservation medium can be cryopreserved by reducing the storage temperature to −80° C. to −180° C.

[0749] In some embodiments, the method comprises administering an allogeneic immune cells described herein. In some embodiments, the method comprises administering a conditioning regimen prior to administering the allogeneic immune cells described herein. In some embodiments, the conditioning regimen is lymphodepletion. A lymphodepletion regimen can include, for example, administration of alemtuzumab, cyclophosphamide, benduamustin, rituximab, pentostatin, and/or fludarabine. Lymphodepletion regimen can be administered in one or more cycles until the desired outcome of reduced circulating immune cells.

[0750] In some embodiments, the conditioning regimen comprises administering an agent that specifically targets, and reduces or eliminates CD52+ cells in the subject, and the allogeneic immune cells are modified to reduce or eliminate CD52 expression.

[0751] In some embodiments, the method of treatment comprises determining the HLA germline type of the subject. In some embodiments, determining the HLA germline type comprises determining the presence of HLA-A*02:01 heterozygosity. In some embodiments, the HLA germline type is determined in bone marrow.

[0752] In some embodiments, the method of treatment comprises determining the level of expression of an activator ligand. In some embodiments, the level of expression of an activator ligand is determined in tumor tissue samples from the subject. In some embodiments, the expression level of an activator ligand is determined using next generation sequencing. In some embodiments, the expression level of an activator ligand is determined using RNA sequencing. In some embodiments, the level of an activator ligand is determined using immunohistochemistry.

[0753] In some embodiments, the method of treatment comprises administering a therapeutically effective dose of allogeneic immune cells in a subject in need thereof, wherein the subject is determined to be HLA germline HLA-A*02:01 heterozygous and have tumor tissue with activator expression and loss of HLA-A*02:01.

[0754] In some embodiments, a therapeutically effective dose of the allogeneic immune cells described herein are administered. In some embodiments, the genetically modified allogeneic immune cells of the disclosure are administered by intravenous injection. In some embodiments, the genetically modified allogeneic immune cells of the disclosure are administered by intraperitoneal injection. In some embodiments, a therapeutically effective dose comprises about 0.5×10⁶ cells, about 1×10⁶ cells, about 2×10⁶ cells, about 3×10⁶ cells, 4×10⁶ cells, about 5×10⁶ cells, about 6×10⁶ cells, about 7×10⁶ cells, about 8×10⁶ cells, about 9×10⁶ cells, about 1×10⁷, about 2×10⁷, about 3×10⁷, about 4×10⁷, about 5×10⁷, about 6×10⁷, about 7×10⁷, about 8×10⁷, about 9×10⁷, 1×10⁸ cells, about 2×10⁸ cells, about 3×10⁸ cells, about 4×10⁸ cells, about 5×10⁸ cells, or about 6×10⁸ cells. In some embodiments, a therapeutically effective dose comprises about 0.5×10⁶ cells to about 6×10⁸ cells, about 1×10⁶ cells to about 5×10⁸ cells, about 2×10⁶ cells to about 5×10⁸ cells, about 3×10⁶ cells to about 4×10⁸ cells, about 4×10⁶ cells to about 3×10⁸ cells, about 5×10⁶ cells to about 2×10⁸ cells, about 6×10⁶ cells to about 1×10⁸ cells, about 7×10⁶ cells to about 9×10⁷ cells, about 8×10⁶ cells to about 8×10⁷ cells, about 9×10⁶ cells to about 7×10⁷ cells, about 1×10⁷ cells to about 6×10⁷ cells, or about 2×10⁷ cells to about 5×10⁷ cells. In some embodiments, a therapeutically effective dose comprises about 0.5×10⁶ cells to about 6×10⁸ cells. The term “about” as referred to in a therapeutically dose, can be, for example, ±0.5×10⁶ cells, ±0.5×10⁷ cells, or ±0.5×10⁸ cells.

[0755] In some embodiments, the subject in need thereof has cancer. Cancer is a disease in which abnormal cells divide without control and spread to nearby tissue. In some embodiments, the cancer comprises a liquid tumor or a solid tumor. Exemplary liquid tumors include leukemias and lymphomas. Further cancers that are liquid tumors can be those that occur, for example, in blood, bone marrow, and lymph nodes, and can include, for example, leukemia, myeloid leukemia, lymphocytic leukemia, lymphoma, Hodgkin's lymphoma, melanoma, and multiple myeloma. Leukemias include, for example, acute lymphoblastic leukemia (ALL), acute myeloid leukemia (AML), chronic lymphocytic leukemia (CLL), chronic myelogenous leukemia (CML), and hairy cell leukemia. Exemplary solid tumors include sarcomas and carcinomas. Cancers can arise in virtually an organ in the body, including blood, bone marrow, lung, breast, colon, bone, central nervous system, pancreas, prostate and ovary. Further cancers that are solid tumors include, for example, prostate cancer, testicular cancer, breast cancer, brain cancer, pancreatic cancer, colon cancer, thyroid cancer, stomach cancer, lung cancer, ovarian cancer, Kaposi's sarcoma, skin cancer, squamous cell skin cancer, renal cancer, head and neck cancers, throat cancer, squamous carcinomas that form on the moist mucosal linings of the nose, mouth, throat, bladder cancer, osteosarcoma, cervical cancer, endometrial cancer, esophageal cancer, liver cancer, and kidney cancer. In some embodiments, the condition treated by the methods described herein is metastasis of melanoma cells, prostate cancer cells, testicular cancer cells, breast cancer cells, brain cancer cells, pancreatic cancer cells, colon cancer cells, thyroid cancer cells, stomach cancer cells, lung cancer cells, ovarian cancer cells, Kaposi's sarcoma cells, skin cancer cells, renal cancer cells, head or neck cancer cells, throat cancer cells, squamous carcinoma cells, bladder cancer cells, osteosarcoma cells, cervical cancer cells, endometrial cancer cells, esophageal cancer cells, liver cancer cells, or kidney cancer cells.

[0756] Any cancer wherein a plurality of the cancer cells express the first, activator ligand and do not express the second, inhibitor ligand is envisaged as within the scope of the instant disclosure. For example, CEA positive cancers that can be treated using the methods described herein include colorectal cancer, pancreatic cancer, esophageal cancer, gastric cancer, lung adenocarcinoma, head and neck cancer, diffuse large B cell cancer or acute myeloid leukemia cancer.

[0757] As a further example, EGFR positive cancers that can be treated using the methods described herein include lung cancer, small cell lung cancer, non-small cell lung cancer, pancreatic ductal carcinoma, colorectal cancer, head and neck cancer, esophagus and gastric adenocarcinoma, ovarian cancer, glioblastoma multiforme, cervical squamous cell carcinoma, kidney cancer, papillary kidney cancer, kidney renal clear cell carcinoma, bladder cancer, breast cancer, bile duct cancer, liver cancer, prostate cancer, sarcoma, thyroid cancer, thymus cancer, stomach cancer, or uterine cancer, and all-other EGFR target expressing tumors. The compositions and methods disclosure herein may be used to treating EGFR positive cancers that are relapsed, refractory and/or metastatic.

[0758] As a further example, MSNL positive cancers that ca be treated using the methods described herein include mesothelioma cancer, ovarian cancer, cervical cancer, colorectal cancer, esophageal cancer, head and neck cancer, kidney cancer, uterine cancer, gastric cancer, pancreatic cancer, lung cancer, lung adenocarcinomas, colorectal cancer, or cholangiocarcinoma, as well as other solid epithelial tumors. Further cancers that express MSLN include relapsed, refractory or metastatic gastric, esophageal, head and neck and kidney cancers. In some embodiments, the MSLN positive cancer comprises an epithelial tumor, for example a carcinoma.

[0759] Treating cancer can result in a reduction in size of a tumor. A reduction in size of a tumor may also be referred to as “tumor regression”. Preferably, after treatment, tumor size is reduced by 5% or greater relative to its size prior to treatment; more preferably, tumor size is reduced by 10% or greater; more preferably, reduced by 20% or greater; more preferably, reduced by 30% or greater; more preferably, reduced by 40% or greater; even more preferably, reduced by 50% or greater; and most preferably, reduced by greater than 75% or greater. Size of a tumor may be measured by any reproducible means of measurement. The size of a tumor may be measured as a diameter of the tumor.

[0760] Treating cancer can result in a reduction in tumor volume. Preferably, after treatment, tumor volume is reduced by 5% or greater relative to its size prior to treatment; more preferably, tumor volume is reduced by 10% or greater; more preferably, reduced by 20% or greater; more preferably, reduced by 30% or greater; more preferably, reduced by 40% or greater; even more preferably, reduced by 50% or greater; and most preferably, reduced by greater than 75% or greater. Tumor volume may be measured by any reproducible means of measurement.

[0761] Treating cancer results in a decrease in number of tumors. Preferably, after treatment, tumor number is reduced by 5% or greater relative to number prior to treatment; more preferably, tumor number is reduced by 10% or greater; more preferably, reduced by 20% or greater; more preferably, reduced by 30% or greater; more preferably, reduced by 40% or greater; even more preferably, reduced by 50% or greater; and most preferably, reduced by greater than 75%. Number of tumors may be measured by any reproducible means of measurement. The number of tumors may be measured by counting tumors visible to the naked eye or at a specified magnification. Preferably, the specified magnification is 2×, 3×, 4×, 5×, 10×, or 50×.

[0762] Treating cancer can result in a decrease in number of metastatic lesions in other tissues or organs distant from the primary tumor site. Preferably, after treatment, the number of metastatic lesions is reduced by 5% or greater relative to number prior to treatment; more preferably, the number of metastatic lesions is reduced by 10% or greater; more preferably, reduced by 20% or greater; more preferably, reduced by 30% or greater; more preferably, reduced by 40% or greater; even more preferably, reduced by 50% or greater; and most preferably, reduced by greater than 75%. The number of metastatic lesions may be measured by any reproducible means of measurement. The number of metastatic lesions may be measured by counting metastatic lesions visible to the naked eye or at a specified magnification. Preferably, the specified magnification is 2×, 3×, 4×, 5×, 10×, or 50×.

[0763] Treating cancer can result in an increase in average survival time of a population of treated subjects in comparison to a population receiving carrier alone. Preferably, the average survival time is increased by more than 30 days; more preferably, by more than 60 days; more preferably, by more than 90 days; and most preferably, by more than 120 days. An increase in average survival time of a population may be measured by any reproducible means. An increase in average survival time of a population may be measured, for example, by calculating for a population the average length of survival following initiation of treatment with an active compound. An increase in average survival time of a population may also be measured, for example, by calculating for a population the average length of survival following completion of a first round of treatment with an active compound.

[0764] Treating cancer can result in an increase in average survival time of a population of treated subjects in comparison to a population of untreated subjects. Preferably, the average survival time is increased by more than 30 days; more preferably, by more than 60 days; more preferably, by more than 90 days; and most preferably, by more than 120 days. An increase in average survival time of a population may be measured by any reproducible means. An increase in average survival time of a population may be measured, for example, by calculating for a population the average length of survival following initiation of treatment with an active compound. An increase in average survival time of a population may also be measured, for example, by calculating for a population the average length of survival following completion of a first round of treatment with an active compound.

[0765] Treating cancer can result in increase in average survival time of a population of treated subjects in comparison to a population receiving monotherapy with a drug that is not a compound of the present invention, or a pharmaceutically acceptable salt, prodrug, metabolite, analog or derivative thereof. Preferably, the average survival time is increased by more than 30 days; more preferably, by more than 60 days; more preferably, by more than 90 days; and most preferably, by more than 120 days. An increase in average survival time of a population may be measured by any reproducible means. An increase in average survival time of a population may be measured, for example, by calculating for a population the average length of survival following initiation of treatment with an active compound. An increase in average survival time of a population may also be measured, for example, by calculating for a population the average length of survival following completion of a first round of treatment with an active compound.

[0766] Treating cancer can result in a decrease in the mortality rate of a population of treated subjects in comparison to a population receiving carrier alone. Treating cancer can result in a decrease in the mortality rate of a population of treated subjects in comparison to an untreated population. Treating cancer can result in a decrease in the mortality rate of a population of treated subjects in comparison to a population receiving monotherapy with a drug that is not a compound of the present invention, or a pharmaceutically acceptable salt, prodrug, metabolite, analog or derivative thereof. Preferably, the mortality rate is decreased by more than 2%; more preferably, by more than 5%; more preferably, by more than 10%; and most preferably, by more than 25%. A decrease in the mortality rate of a population of treated subjects may be measured by any reproducible means. A decrease in the mortality rate of a population may be measured, for example, by calculating for a population the average number of disease-related deaths per unit time following initiation of treatment with an active compound. A decrease in the mortality rate of a population may also be measured, for example, by calculating for a population the average number of disease-related deaths per unit time following completion of a first round of treatment with an active compound.

[0767] Treating cancer can result in a decrease in tumor growth rate. Preferably, after treatment, tumor growth rate is reduced by at least 5% relative to number prior to treatment; more preferably, tumor growth rate is reduced by at least 10%; more preferably, reduced by at least 20%; more preferably, reduced by at least 30%; more preferably, reduced by at least 40%; more preferably, reduced by at least 50%; even more preferably, reduced by at least 50%; and most preferably, reduced by at least 75%. Tumor growth rate may be measured by any reproducible means of measurement. Tumor growth rate can be measured according to a change in tumor diameter per unit time.

[0768] Treating cancer can result in a decrease in tumor regrowth. Preferably, after treatment, tumor regrowth is less than 5%; more preferably, tumor regrowth is less than 10%; more preferably, less than 20%; more preferably, less than 30%; more preferably, less than 40%; more preferably, less than 50%; even more preferably, less than 50%; and most preferably, less than 75%. Tumor regrowth may be measured by any reproducible means of measurement. Tumor regrowth is measured, for example, by measuring an increase in the diameter of a tumor after a prior tumor shrinkage that followed treatment. A decrease in tumor regrowth is indicated by failure of tumors to reoccur after treatment has stopped.

[0769] Treating or preventing a cell proliferative disorder can result in a reduction in the rate of cellular proliferation. Preferably, after treatment, the rate of cellular proliferation is reduced by at least 5%; more preferably, by at least 10%; more preferably, by at least 20%; more preferably, by at least 30%; more preferably, by at least 40%; more preferably, by at least 50%; even more preferably, by at least 50%; and most preferably, by at least 75%. The rate of cellular proliferation may be measured by any reproducible means of measurement. The rate of cellular proliferation is measured, for example, by measuring the number of dividing cells in a tissue sample per unit time.

[0770] Treating or preventing a cell proliferative disorder can result in a reduction in the proportion of proliferating cells. Preferably, after treatment, the proportion of proliferating cells is reduced by at least 5%; more preferably, by at least 10%; more preferably, by at least 20%; more preferably, by at least 30%; more preferably, by at least 40%; more preferably, by at least 50%; even more preferably, by at least 50%; and most preferably, by at least 75%. The proportion of proliferating cells may be measured by any reproducible means of measurement. Preferably, the proportion of proliferating cells is measured, for example, by quantifying the number of dividing cells relative to the number of nondividing cells in a tissue sample. The proportion of proliferating cells can be equivalent to the mitotic index.

[0771] Treating or preventing a cell proliferative disorder can result in a decrease in size of an area or zone of cellular proliferation. Preferably, after treatment, size of an area or zone of cellular proliferation is reduced by at least 5% relative to its size prior to treatment; more preferably, reduced by at least 10%; more preferably, reduced by at least 20%; more preferably, reduced by at least 30%; more preferably, reduced by at least 40%; more preferably, reduced by at least 50%; even more preferably, reduced by at least 50%; and most preferably, reduced by at least 75%. Size of an area or zone of cellular proliferation may be measured by any reproducible means of measurement. The size of an area or zone of cellular proliferation may be measured as a diameter or width of an area or zone of cellular proliferation.

[0772] Treating or preventing a cell proliferative disorder can result in a decrease in the number or proportion of cells having an abnormal appearance or morphology. Preferably, after treatment, the number of cells having an abnormal morphology is reduced by at least 5% relative to its size prior to treatment; more preferably, reduced by at least 10%; more preferably, reduced by at least 20%; more preferably, reduced by at least 30%; more preferably, reduced by at least 40%; more preferably, reduced by at least 50%; even more preferably, reduced by at least 50%; and most preferably, reduced by at least 75%. An abnormal cellular appearance or morphology may be measured by any reproducible means of measurement. An abnormal cellular morphology can be measured by microscopy, e.g., using an inverted tissue culture microscope. An abnormal cellular morphology can take the form of nuclear pleiomorphism.

### Kits and Articles of Manufacture

[0773] The disclosure provides kits and articles of manufacture comprising the polynucleotides and vectors encoding the engineered receptors described herein, and immune cells comprising the engineered receptors described herein (e.g., edited using gene editing systems described herein and/or comprising the engineered receptors described herein). In some embodiments, the kit comprises articles such as vials, syringes and instructions for use.

[0774] In some embodiments, the kit comprises a polynucleotide or vector comprising a sequence encoding one or more engineered receptors of the disclosure.

[0775] In some embodiments, the kit comprises a plurality of immune cells comprising an engineered receptor as described herein. In some embodiments, the plurality of immune cells comprises a plurality of T cells.

[0776] The disclosure provides kits and articles of manufacture comprising the polynucleotides and vectors encoding the interfering RNAs and engineered receptors described herein, and immune cells with reduced or eliminated HLA expression and/or function described herein and comprising the engineered receptors described herein. In some embodiments, the kit comprises articles such as vials, syringes and instructions for use.

[0777] In some embodiments, the kit comprises a polynucleotide or vector comprising a sequence encoding the interfering RNAs and/or one or more engineered receptors of the disclosure.

[0778] In some embodiments, the kit comprises a plurality of immune cells comprising an interfering RNA and/or engineered receptor as described herein. In some embodiments, the plurality of immune cells comprises a plurality of T cells.

### EXAMPLES

### Example 1: Selection of Activator Target Ligands

[0779] The inventors surveyed the GTex gene expression database (gtexportal.org/home/) for activator ligands. Activator ligands should have the following properties: first, One type of activator ligand should have high surface expression, which confers the potential to deliver large activation signals. Alternatively, activators such as MiHAs can have low density on the cell surface. Second, activator ligands can have essential cellular functions, which prevents alleles of the activator ligands being lost due to aneuploidy in tumor cells, and makes them less likely to undergo mutagenesis during the evolution of the tumor. Lastly, activator ligands should be present on all tumor cells. Activator ligands can be expressed on all cells, if the inhibitor ligand is also expressed on all cells except the target cells. Activators should also be expressed on cancer cells. Activators, when used in combination with inhibitors can be widely expressed, for example on all cells.

[0780] FIG. 4A shows the RNA expression profile of an exemplary activator ligand, the transferrin receptor (TFRC). As seen in FIG. 4A, expression of TFRC at the RNA level is ubiquitous and relatively even. Further, TFRC is an essential gene: loss of function homozygous TFRC mutations are embryonic lethal in mice.

[0781] FIG. 4B shows the expression profiles of a candidate blocker, HLA-A, and candidate activator, HLA-B. As can be seen in FIG. 4B, candidate activator and blocker HLA class I expression tracks together, easing the challenging of optimizing activator and blocker pairs.

### Example 2: Selection of Inhibitor Target Ligands that are Lost in Cancer Cells

### Loss of Heterozygosity

[0782] One potential pool of inhibitor ligands are ligands that are lost in tumor cells due to loss of heterozygosity. In an analysis of 3131 tumor samples across 26 histological types, Beroukhim et al. found that in a typical tumor, 25% of the genome is affected by arm number single copy number alterations (duplications and deletions), and 10% of the genome is affected by focal single copy number alterations, with 2% overlap. (Beroukhim et al, Nature 463:899-905 (2010)). Further, many of the LOH regions overlap between tumor types, and only 22% of regions are unique to one tumor type. For example, Beroukhim et al. found that 80% of amplification peaks and 78% of deletion peaks were common to the 17 most represented tumor types. Thus, alleles that are lost to LOH that can be selectively bound by an inhibitor LBD are potential inhibitor targets that are not expressed by target cells.

[0783] The inventors surveyed the Cancer Genome Atlas Program (http://portals.broadinstitute.org/tcga/home) for potential inhibitor ligands that were lost in cancers through loss of heterozygosity. The dataset all_cancers dataset (all_cancers) consisted of 10,844 cancer samples from 33 cancer types. One type of inhibitor ligands should have the following properties: first, inhibitor ligands should have high, homogeneous surface expression across tissues. This confers the ability to deliver a large, even-handed inhibitory signal. Inhibitor ligands should be absent or polymorphic in many tumors. Further, it should be easy to distinguish loss of the inhibitor ligand in tumor cells via conventional methods such as antibody stains or genetic analysis. Other types of inhibitor ligands, such as MiHAs, can have low surface expression.

[0784] One pool of inhibitor ligands are major histocompatibility complex (MHC) alleles that are lost through LOH in cancer cells. Use of these alleles as inhibitor ligands does not require a peptide MHC target (pMHC), for example, a pan HLA-A*02 allele can be used.

### Loss of Y Chromosome

[0785] Adult male-expressed Y chromosome genes are potential inhibitor ligands through loss of Y chromosome. There are at least 60 protein coding genes on the Y chromosome. Several Y chromosome genes are expressed broadly in adult males and may be lost in cancers via loss of Y chromosome. Several other broadly expressed cytoplasmic proteins are pMHC inhibitor candidates (e.g., TMSB4Y, EIF1AY). NLGN4Y is a Type I integral membrane protein expressed broadly in males, and also a candidate.

### Example 3: Targeting Cells Lacking Surface Antigen with Paired A and B Receptors

[0786] We show that the targeting system for loss of heterozygosity works in vitro and in a mouse cancer model.

[0787] Discrimination between normal and tumor cells depends on two functions: (i) an activator (“A”) receptor that recognizes an epitope on the surface of normal cells that is also retained on the tumor; and, (ii) a blocker (“B”) receptor that recognizes a second surface epitope on an allelic product lost from the tumor cell. In this Example, we used peptide-MHC (pMHC) targets for both the A and B (see FIG. 5A):
[0788] a chimeric antigen receptor comprising an scFv against HLA-A*02-MAGE-A3 (FLWGPRALV) pMHC as the A receptor; and
[0789] a chimeric antigen receptor comprising an scFv that binds HLA-A*02-NY-ESO-1 (SLLMWITQC/V) as the B receptor and comprising a PD-1 intracellular domain (ICD), a CTLA-4 intracellular domain (ICD) or a LILRB1 (LIR1) intracellular domain (ICD).

[0790] Each blocker (B) receptor, with a PD-1 ICD or a CTLA-4-ICD, mediated a shift in EC50 of activation in Jurkat cells of <10×, measured by titration of peptides loaded on T2 cells as stimulus (FIG. 5B). Surprisingly, B receptors comprising a NY-ESO-1 LBD and the intracellular, transmembrane and hinge domains of the LIR-1 (LILRB1) receptor mediated an EC50 shift of >5,000× (also FIG. 5B). Titration of unrelated control HLA-A*02-binding peptides other than SLLMWITQC/V provided an estimate of the shift caused by competition of loaded peptides on T2 cells for available HLA molecules, a contribution to the total shift typically <10× (FIG. 8). For the EC50 shift values reported here, we typically compare to EC50s of activator-only constructs.

[0791] For four different pMHC targets, a total of six different scFvs grafted onto LIR-1 mediated dramatic shifts in EC50, ranging from 10 to 1,000× (FIG. 5C). The degree of EC50 shift (i.e., blocking strength) correlated with the EC50 of the scFv when fused to a standard CAR (data not shown). LIR-1B signaling blocked A signaling from multiple A targets and scFvs (FIG. 5D, FIG. 26). The blockade was ligand-dependent (FIG. 9). Control B receptors with a LBD, but which lack an ICD or contain mutations in key elements of the ICD do not block activation by A receptor signal. (FIG. 10). Engineered T cells with A receptor and B receptor function across multiple target antigens and antigen binding domains (i.e., LBD sequences).

[0792] The LIR-1 ICD also functions when fused to a T cell receptor (TCR) extracellular domain with three different pMHC targets (see Methods). TCRs against three different pMHC targets, two from MAGE-A3 and one form HPV, were assayed. In every case, a LIR-1 based B receptor shifted the activation EC50 by large amounts, ranging from 1,000 to 10,000×. LIR-1 based B receptors with an NY-ESO-1 TCR variable domain LBD “ESO (Ftcr)” fused to it were also able to block activation by a CAR or TCR. This included the following receptor pairs

1. An activator (A) TCR comprising a TCR LBD (“MP1-TCR”) that binds MAGE-A3_{FLWGPRALV} peptide:MHC complexes was blocked by a B receptor comprising an scFv NY-ESO-1 scFv LBD (“ESO”) and a LIR-1 ICD, which shifted the activation EC50 by a large amount (FIG. 5E);
2. An A TCR comprising a second TCR LBD (“MP2-TCR”) that binds the MAGE-A3_{MPKVAELVHFL} peptide:MHC complexes was blocked by a B receptor comprising an scFv NY-ESO-1 scFv LBD (“ESO”) and a LIR-1 ICD, which shifted the activation EC50 by a large amount (FIG. 5E);
3. An A TCR comprising a TCR LBD (“HPV E6-TCR”) that binds an HPV_{TIHDIILECV} peptide:MHC complex was blocked by a B receptor comprising an scFv NY-ESO-1 scFv LBD (“ESO”) and a LIR-1 ICD, which shifted the activation EC50 by large amounts (FIG. 5E);
4. An A TCR comprising a TCR LBD (“MP1-TCR”) that binds a MAGE-A3_{FLWGPRALV} peptide:MHC complexes was blocked by a B receptor comprising an NY-ESO-1 TCR LBD (“ESO(Ftcr)”), and a LIR-1 ICD, This blocker shifted the activation EC50 by large amounts (FIG. 5F);
5. An A CAR comprising a scFv LBD (“MP1-CAR”) that binds the MAGE-A3_{FLWGPRALV} peptide:MHC complexes was blocked by a B receptor comprising an TCR NY-ESO-1 TCR variable domain LBD (“ESO(Ftcr)”), and a LIR-1 ICD. This blocker shifted the activation EC50 by large amounts (FIG. 5F).

### Confirming Cis Effect

[0793] Engineered effector cells should discriminate potential target cells that are A+ only, i.e. display only the activator, from those that are dual A+ and B+. To affirm our receptor system works as intended, target-loaded beads roughly the size of cells (d˜2.8 μm) were tested with engineered effector cells (Jurkat cells) having A receptor and B receptor (FIG. 5G). Effector cells were indeed activated by a mixture of A+ and B+ beads, even when the A+ beads comprised only 20% of the total beads. This confirms effector cells are able to recognize targets having loss of heterozygosity (represented by A+ beads) in a mixed population comprising normal cells (represented by B+ beads).

### Confirming Target Concentration Independence

[0794] In patients, target density will vary depending on the expression levels of the A target and B target. We confirmed the system works with both high density and low density targets, both when A target density is varied (data not shown) and when B target density is varied (FIG. 5H) FIG. 5H, scFvs that bound either the B-cell marker CD19 or HLA-A*02 in a peptide-independent fashion were tested. These non-pMHC targets represent surface antigens that can extend into the realm of 100,000 epitopes/cell. In this case, the ratio of A to B module expression was varied using different DNA concentrations in transient transfection assays. Emax shifts of over 10× were observed. These experiments showed that the properties of the dual receptor system observed for pMHC targets were generally the same for high-density targets.

### B Receptor Function in Primary T Cells

[0795] MCF7 tumor cells expressing renilla luciferase (Biosettia) loaded with a titration of target peptide were used as target cells, with the luciferase as the readout for cell viability. Primary T cells were transduced with an HPV TCR as the A receptor (“HPV E7 TCR”) and a B receptor comprising an anti-NY-ESO-1 scFv fused to a LIR-1 hinge, transmembrane domain and ICD (“ESO-LIR-1”), or not transduced (“Untransduced”). Transduced T cells were enriched via physical selection using beads coupled to HLA-A*02 tetramers that bind to the B receptor LBD. To vary target concentration, the target cells were loaded with varying amounts of HPV peptide. Primary T cells were activated in a dose dependent matter. Expression of the B receptor shifted the EC50 curve by ˜100× (FIG. 6A). A similar result was obtained for an anti-NY-ESO-1 CAR A receptor paired with B receptor comprising an anti-HLA-A*02 LBD and an LIR-1 hinge, transmembrane domain and ICD at various ratios of A receptor to B receptor (achieved by transfecting various activator:blocker DNA ratios) in Jurkat cells (FIG. 6B). This result was confirmed with a CD19 CAR activator paired with an HLA-A*02 blocker in T cells (FIG. 6C). Thus, the basic function of the activator and blocker receptor pair was reproduced in primary T cells, despite their complexity, heterogeneity and donor-to-donor variability.

### Example 4: Targeting Loss of Heterozygosity with Paired A and B Receptors

[0796] The HLA locus is polymorphic with only a subset of the population having the HLA-A*02 allele. A ligand-binding domain that binds MHC of the HLA*A02 allele independent of loaded peptide (a “pan HLA-A*02” LBD) may be used to target tumors in subjects heterozygous for HLA and having LOH of the HLA-A*02 allele in tumor cells.

[0797] An HLA-A*02-specific scFv was fused to the LIR-1 module and shown to function as a blocker in the presence of pMHC-dependent activators (ESO-CAR, FIG. 6B) in Jurkat cells. Furthermore, in primary T cells expressing both an A receptor comprising an anti-CD19 scFv and a B receptor comprising an HLA-A*02-specific scFv and a LIR-1 LBD, the B receptor blocked the A receptor as desired (FIG. 6C).

[0798] Raji target cells that are CD19+ and negative for HLA-A*02 can be used to model tumor cells that have lost HLA-A*02 through LOH. The same cell line stably expressing HLA-A*02 can be used as a model of normal cells. Raji cell lines activated Jurkat effector cells expressing a CD19 CAR and the HLA-A*02 LIR-1 blocker if the Raji target cells expressed CD19 only. When the Raji target cells were transfected with a polynucleotide encoding HLA-A*02, activation of the Jurkat effector cells was blocked (FIG. 11).

[0799] As described above, the A receptor binding CD19 and B receptor binding HLA-A*02 worked in primary T cells as well as Jurkat cells. Engineered T cells killed CD19-expressing Raji cells in the absence of HLA-A*02 expression (FIG. 6C, upper panels). Raji cells that expressed both CD19 and HLA-A*02 were killed by T cells expressing only the activating module, but blocked from both gamma-interferon (IFNg) secretion (data not shown) and cytotoxicity when co-cultured with T cells expressing both activator and blocker modules (FIG. 6C, middle panels). Primary T cells bearing the activator and blocker modules distinguished CD19+“tumor” (FIG. 6C, lower panels) from CD19+/HLA-A*02+“normal” cells (FIG. 6C, right panels) in a mixed culture.

[0800] A T cell therapeutic based on the activator and blocker mechanism should be able to function reversibly, i.e. be able to cycle from a state of blockade to activation and back to blockade. Effector cells were co-cultured with multiple rounds of Raji cells that were either CD19+ or D19+/HLA-A2*02+, which were removed from culture between rounds. As desired, effector cells exposed to normal cells were not activated when exposed to Raji target cells for both block-kill-block (FIG. 6D) and kill-block-kill programs of target cell exposure (FIG. 6E). Effector T cells were able to cycle from a state of block to cytotoxicity and back, depending on the target cells to which they were exposed.

### Example 5: In Vivo Targeting of Loss of Heterozygosity with Paired A and B Receptors

[0801] To prepare for in vivo experiments, we showed that the CD19/HLA-A*02 activator/blocker pair engineered in primary T cells allowed expansion in vitro to large numbers using standard CD3/CD28 stimulation (FIG. 7A). Thus, a cell product can be produced in sufficient quantity for use in patients as a therapeutic.

[0802] A CD19+/HLA-A*02+ or CD19+/HLA-A*02− tumor cell mouse xenograft was generated by injecting Raji target cells into the flanks of immunocompromised (NGS-HLA-A2.1) mice (FIG. 7B). Raji cells were injected at two doses, 2e6 or 1e7 T cells, and the growth of the tumor and the persistence of the implanted T cells were analyzed over time. Only CD19+/HLA-A*02− tumor cells were killed in the mouse and the tumor control tracked with transferred T cell numbers, promoting survival of the host mice (FIGS. 7C-7E and FIG. 12). Normal CD19+/HLA-A*02+ cells designed to model normal cells were unaffected by treatment.

### SUMMARY

[0803] We have developed a synthetic signal integration system that can take advantage of a large, new class of cancer targets derived from LOH. The system, without undue experimentation, meets requirements of a cell therapy for patients with LOH. The system works robustly in Jurkat cells, primary T cells, and in vivo. This system is also (i) modular and flexible, and works across CAR and TCR modalities with different target densities; (ii) silenced when the blocker and activator targets are present on one surface in cis, but not when a minority of cells expresses only the activator; and, (iii) switches states reversibly, consistent with the need to hunt tumor cells throughout the body.

### Example 6: Methods for Examples 3-5

### Cell Culture

[0804] Jurkat cells encoding an NFAT Luciferase reporter were obtained from BPS Bioscience. All other cell lines used in this study were obtained from ATCC. In culture, Jurkat cells were maintained in RPMI media supplemented with 10% FBS, 1% Pen/Strep and 0.4 mg/mL G418/Geneticin. T2, MCF7, and Raji cells were maintained as suggested by ATCC. “Normal” Raji cells were made by transducing Raji cells with HLA-A*02 lentivirus (custom lentivirus, Alstem) at a MOI of 5. HLA-A*02-positive Raji cells were sorted using a FACSMelody Cell Sorter (BD).

### Plasmid Construction

[0805] The NY-ESO-1-responsive inhibitory construct was created by fusing the NY-ESO-1 scFv LBD to domains of receptors including hinge, transmembrane region, and/or intracellular domain of leukocyte immunoglobulin-like receptor subfamily B member 1, LILRB1 (LIR-1), programmed cell death protein 1, PDCD1 (PD-1), or cytotoxic T-lymphocyte protein 4, CTLA4 (CTLA-4). Gene segments were combined using Golden Gate cloning and inserted downstream of a human EFla promoter contained in a lentiviral expression plasmid.

### Jurkat Cell Transfection

[0806] Jurkat cells were transiently transfected via 100 uL format Neon electroporation system (Thermo Fisher Scientific) according to manufacturer's protocol using the following settings: 3 pulses, 1500V, 10 msec. Cotransfection was performed with 1-3 ug of activator CAR or TCR construct and 1-3 ug of either scFv or Ftcr blocker constructs or empty vector per 1e6 cells and recovered in RPMI media supplemented with 20% heat-inactivated FBS and 0.1% Pen/Strep.

### Jurkat-NFAT-Luciferase Activation Studies

[0807] Peptides, MAGE-A3 (MP1; FLWGPRALV), MAGE-A3 (MP2; MPKVAELVHFL), HPV E6 (TIHDIILECV), HPV E7 (YMLDLQPET) and modified NY-ESO-1 ESO (ESO; SLLMWITQV), were synthesized by Genscript. Activating peptide was serially diluted starting at 50 uM. Blocker peptide, NY-ESO-1, was diluted to 50 uM (unless otherwise indicated) which was added to the activating peptide serial dilutions and subsequently loaded onto 1e4 T2 cells in 15 uL of RPMI supplemented with 1% BSA and 0.1% Pen/Strep and incubated in Corning® 384-well Low Flange White Flat Bottom Polystyrene TC-treated Microplates. The following day, 1e4 Jurkat cells were resuspended in 15 uL of RPMI supplemented with 10% heat-inactivated FBS and 0.1% Pen/Strep, added to the peptide-loaded T2 cells and cocultured for 6 hours. ONE-Step Luciferase Assay System (BPS Bioscience) was used to evaluate Jurkat luminescence. Assays were performed in technical duplicates.

### Primary T Cell Transduction, Expansion, and Enrichment

[0808] Frozen PBMCs were thawed in 37° C. water bath and cultured at 1e6 cells/mL in LymphoONE (Takara) with 1% human serum and activated using 1:100 of T cell TransAct (Miltenyi) supplemented with IL-15 (long/mL) and IL-21 (1 Ong/mL). After 24 hours, lentivirus was added to PBMCs at a MOI of 5. PBMCs were cultured for 2-3 additional days to allow cells to expand under TransAct stimulation. Post expansion, activator and blocker transduced primary T cells were enriched using anti-PE microbeads (Miltenyi) according to manufacturer's instructions. Briefly, primary T cells were incubated with CD19-Fc (R&D Systems) at 1:100 dilution for 30 minutes at 4° C. in MACS buffer (0.5% BSA+2 mM EDTA in PBS). Cells were washed 3 times in MACS buffer and incubated in secondary antibody (1:200) for 30 minutes at 4° C. in MACS buffer. Cells were then incubated in anti-PE microbeads and passed through the LS column (Miltenyi).

### Primary T Cell In Vitro Cytotoxicity Studies

[0809] For cytotoxicity studies with pMHC targets, enriched primary T cells were incubated with 2e3 MCF7 cells expressing renilla luciferase (Biosettia) loaded with a titration of target peptide as described above at an effector:target ratio of 3:1 for 48 hours. Live luciferase-expressing MCF7 cells were quantified using a Renilla Luciferase Reporter Assay System (Promega). For cytotoxicity studies with non-pMHC targets, enriched primary T cells were incubated with 2e3 WT Raji cells (“tumor” cells) or HLA-A*02 transduced Raji cells (“normal” cells) at an effector:target ratio of 3:1 for up to 6 days. WT “tumor” Raji cells stably expressing GFP and renilla luciferase (Biosettia) or HLA-A*02 “normal” Raji cells were stably expressing RFP and firefly luciferase (Biosettia) were imaged together with unlabeled primary T cells using an IncuCyte live cell imager. Fluorescence intensity of live Raji cells over time was quantified using IncuCyte imaging software. For reversibility studies, enriched primary T cells were similarly cocultured with “normal” or “tumor” Raji cells for 3 days and imaged. After 3 days, T cells were separated from remaining Raji cells using CD19 negative selection and reseeded with fresh “normal” or “tumor” Raji cells as described. In separate wells, live luciferase-expressing Raji cells were quantified using a Dual-Luciferase Reporter Assay System (Promega).

### Mouse Xenograft Study

[0810] Frozen PBMCs were thawed in 37° C. water bath and rested overnight in serum-free TexMACS Medium (Miltenyi) prior to activation. PBMCs were activated in 1.5e6 cells/mL using T cell TransAct (Miltenyi) and TexMACS Medium supplemented with IL-15 (20 ng/mL) and IL-21 (20 ng/mL). After 24 hours, lentivirus was added to PBMCs at a MOI of 5. PBMCs were cultured for 8-9 additional days to allow cells to expand under TransAct stimulation. Post expansion, T cells were enriched on A2-LIR-1 (pMHC HLA-A*02 ScFv fused to a LIR-1 hinge, TM and ICD) using anti-PE microbeads (Miltenyi) against streptavidin-PE-HLA-A*02− pMHC prior to in vivo injection.

[0811] 5-6 week old female NOD.Cg-Prkdcscid I12rgtm1Wjl Tg(HLA-A/H2-D/B2M)1Dvs/SzJ (NSG-HLA-A2/HHD) mice were purchased from The Jackson Labs. Animals were acclimated to the housing environment for at least 3 days prior to the initiation of the study. Animals were injected with 2e6 WT Raji cells or HLA-A*02 transduced Raji cells in 100 uL volume subcutaneously in the right flank. When tumors reached an average of 70 mm³ (V=L×W×W/2), animals were randomized into 5 groups (n=7) and 2e6 (data not shown) or 1e7 T cells were administered via the tail vein. Post T cell injection, tumor measurements were performed 3 times per week and blood was collected 10 days and 17 days after for flow analysis. Post RBC lysis, cells were stained with anti-hCD3 antibody, anti-hCD4 antibody, anti-hCD8 antibody, anti-msCD45 antibody (Biolegend).

### Example 7

[0812] The ability of a blocker receptor with an HLA-A-A*02 antigen binding domain and a LIR-1 ICD (C1765) to block activation of Jurkat cells expressing an activator CAR with an EGFR antigen binding domain (CT479) was assayed using the NFAT-luciferase reporter system as previously described. Wild type HeLa tumor cells, which were EGFR+ and HLA-A*02−, were used as target cells. EGFR+/HLA-A*02− HeLa cells were also transduced with a polynucleotide encoding HLA-A*02+ to generate EGFR+/HLA-A*02+ HeLa cells to use as target cells expressing both activator and blocker antigens.

[0813] As shown in FIG. 13, expression of the HLA-A*02 LIR-1 blocker in Jurkat cells expressing the EGFR CAR shifts the CAR E_{MAX} by >5 fold compared to the CAR Emax of Jurkat cells that do not express the blocker.

[0814] Furthermore, lower blocking was observed with lower HLA-A2 expression levels on target cells. Wild type HCT116 cells are EGFR+ and HLA-A*02. The levels of EGFR and HLA-A*02 were assayed in HCT116 cells and HeLa cells transduced with polynucleotides encoding the HLA-A*02 polynucleotides using an anti-EGFR antibody and an anti-HLA-A*02 antibody (BB7.2) followed by FACs sorting. As shown in FIGS. 14A & 14B, HCT116 cells have lower levels of blocker HLA-A*02 antigen than transduced HeLa cells. When Jurkat cells expressing the EGFR CAR and HLA-A*02 LIR-1 blocker were presented with HCT116 target cells expressing EGFR and HLA-A*02 antigens, presence of the HLA-A*02 LIR-1 blocker shifted the E_{MAX} of the EGFR CAR 1.8 fold (FIG. 15B). In contrast, transduced HeLa cells, which expressed a higher level of HLA-A*02 antigen, were able to mediate an EGFR CAR E_{MAX} shift of >5 fold (FIG. 13). As a control, there was minimal activation by EGFR knockout HCT116 cells (FIG. 15A).

[0815] The ratio of blocker to activator necessary to achieve 50% blocking using the EGFR CAR and HLA-A*02 LIR-1 blocker was assayed using a bead based system, which is shown in FIGS. 16A and 16B.

[0816] To determine the EC50 of the activator antigen, activator beads were coated with activator antigen at different concentrations. An irrelevant protein was added to each concentration so that the total protein concentration was the same, and a constant amount of beads was added to Jurkat effector cells expressing the EGFR CAR (FIG. 16A).

[0817] To determine blocker antigen IC50, beads were coated with activator antigen at the EC50 concentration (determined in FIG. 16A), and coated with blocker antigen at different concentrations. An irrelevant protein was added at each concentration so that the total protein concentration remained the same, and a constant amount of beads was added to Jurkat effector cells expressing either the EGFR CAR or the EGFR CAR and the HLA-A*02 LIR-1 blocker (FIG. 16B).

### Example 8: LIR-1 Based Blockers can Inhibit TCR Signaling Using a Solid Tumor Cell Line

[0818] Jurkat effector cells expressing a MAGE-A3 activator TCR and a NY-ESO-1 scFv LIR-1 based inhibitory receptor (comprising a LIR-1 hinge, TM and ICD), were assayed using A375 target cells loaded with different concentrations of activator and blocker peptides. Jurkat cell activation was assayed using an NFAT luciferase assay (see Example 6).

[0819] As shown in FIG. 17, loading A375 cells with 50 μM NY-ESO-1 peptide shifted the activator TCR E_{MAX} greater than 10 fold. There is an estimated ˜100× difference in peptide loading efficiency in A375 cells versus T2 target cells. Peptide loading may account for the apparent therapeutic window.

### Example 9: HLA-A*02 LIR-1 Based Blockers can Inhibit CAR Signaling Using a B Cell Leukemia Cell Line

[0820] Jurkat effector cells expressing the non-pMHC, high density CD19 specific activator (CD19 scFv CAR activator), with or without co-expression of a pMHC HLA-A*02 scFv LIR-1 based inhibitory receptor (comprising a LIR hinge, TIM and ICD), were assayed using NALM6 target cells. Jurkat cell activation was assayed using an NFAT luciferase assay (see Example 6), and the effector to target cell (E:T) ratio was varied.

[0821] As shown in FIG. 18, expression of the blocker by Jurkat cells was able to shift the E_{MAX} of the CAR by greater than 5 fold.

### Example 10: HLA-A*02 LIR-1 Based Blockers can Inhibit CAR Signaling in a Dose Dependent Manner

[0822] Jurkat effector cells expressing an NY-ESO-1 scFv CAR, and a pMHC HLA-A*02 scFv LIR-1 based inhibitory receptor, were assayed using T2 target cells loaded with varying amounts of peptide (note, in this case the same peptide is recognized by both the activator and blocker ScFv). Jurkat cell activation was assayed using an NFAT luciferase assay (see Example 6). Jurkat cells were transfected with varying ratios of activator to blocker DNA, i.e. 1:1, 1:2 and 1:3 activator to blocker, to vary the ratios of the receptors expressed by the Jurkat cells.

[0823] As can be seen in FIG. 19, even with Jurkat cells transfected with activator and blocker receptor DNA at a ratio of 1:1, the MHC HLA-A*02 scFv LIR-1 based inhibitory receptor (blocker) was able to inhibit activation of Jurkat cells by the activator CAR. Furthermore, the degree to which the inhibitory receptor blocked activation increased with an increased amount of inhibitory receptor DNA compared to activator receptor DNA used in Jurkat cell transfection.

### Example 11: HLA-A*02 LIR-1 Based Blockers can Inhibit a Universal (Pan HLA Class I) Activator with Tunable Strengths

[0824] Activation of Jurkat effector cells expressing pan HLA scFv CARs with three different scFv binding domains based on the pan HLA antibody W6/32, and a pMHC HLA-A*02 scFv LIR-1 based inhibitory receptor were assayed using HLA-A*02 positive T2 cells. As can be seen from FIG. 20, each activator scFv supported a different functional signal in HLA-A*02− negative Jurkat cells. The pMHC HLA-A*02 scFv LIR-1 based inhibitory receptor was able to block functional signal from all three pan HLA scFv CARs when Jurkat cells were contacted with HLA-A*02-positive T2 target cells at an E:T ratio of 1:2. Moreover, the pMHC HLA-A*02 scFv LIR-1 based inhibitory receptor was able to suppress the activator up to 25 fold.

### Example 12: HLA-A*02 LIR-1 Based Inhibitory Receptors can Block Activation by an MSLN CAR Activator

[0825] Activation of Jurkat effector cells expressing an MSLN CAR activator and a pMHC HLA-A*02 ScFv LIR-1 based inhibitory receptor was assayed using the NFAT Luciferase assay described in Example 6.

[0826] Jurkat cells were transfected with activator: blocker DNA at a ratio of 1:4, and activation was assayed in a cell-free bead based assay (FIG. 21A). Beads were loaded with either activator antigen, or activator and blocker antigens, and the ratio of beads to Jurkat cells was varied. In the cell-free bead based assay, the pMHC HLA-A*02 ScFv LIR-1 based inhibitory receptor was able to block activation of the Jurkat cells when cells were contacted with beads carrying the pMHC HLA-A*02 blocker and MSLN activator in cis. Presence of the pMHC HLA-A*02 blocker on the beads was able to shift E_{MAX} of MSLN CAR by greater than or equal to 12X (FIG. 21A).

[0827] Activation Jurkat cells transfected with the same activator and blocker at a 1:4 DNA ratio were assayed for activation using the chronic myelogenous leukemia cell line K562. K562 expresses MLSN, the activator antigen. The response of Jurkat effector cells to K562 cells transduced with HLA-A*02 to express both activator and blocker antigens (MSLN+ HLA-A*02+) and untransduced K562 (MSLN+ HLA-A*02−) that expressed the activator but not the blocker antigen was assayed. As can be seen in FIG. 21B, expression of HLA-A*02+ by the K562 cells was able to shift the MSLN CAR E_{MAX} by greater than 5X.

[0828] The ability of the pMHC HLA-A*02 inhibitory receptor to block activation via the MSNL ScFv CAR was also assayed using effector primary T cells and SiHa or HeLa target cells as described for Raji in Example 6. SiHa and HeLa cells endogenously express MSLN, and were transduced to express the HLA-A*02 inhibitory receptor target. Activation of primary effector T cells was assayed by looking at fold induction of IFNγ. As shown in FIG. 22, the pMHC HLA-A*02 LIR-1 inhibitory receptor was able to block activation of primary T cells when the primary T cells were presented with SiHa or HeLa target cells expressing HLA-A*02 (greater than 10X and 5X inhibition, respectively).

[0829] The pMHC HLA-A*02 inhibitory receptor was also able to inhibit killing by T cells expressing both the MSLN ScFv CAR and the pMHC HLA-A*02 LIR-1 inhibitory receptor, when the T cells were presented with SiHa cells that expressed MSLN but not HLA-A*02 (FIG. 23).

### Example 13: HLA-A*02 LIR-1 Based Inhibitory Receptors can Block Activation by an EGFR CAR Activator

[0830] Activation of Jurkat effector cells expressing an EGFR CAR activator and a pMHC HLA-A*02 ScFv LIR-1 based inhibitory receptor (comprising a LIR-1 hinge, transmembrane and ICD) was assayed using the NFAT Luciferase assay described in Example 6.

[0831] Jurkat cells were transfected with activator and blocker receptor DNA, and activation was assayed in a cell-free bead based assay (FIG. 24). Beads were loaded with either activator antigen, blocker antigen, or activator and inhibitor antigens, and the ratio of beads to Jurkat cells was varied. In the cell-free bead based assay, the HLA-A*02 ScFv LIR-1 based inhibitory receptor was able to block activation of the Jurkat cells when cells were contacted with beads carrying the HLA-A*02 blocker and EGFR activator in cis, but not when the HLA-A*02 blocker and EGFR activator were in trans (on different beads). Presence of the HLA-A*02 blocker on the beads was able to shift E_{MAX} of EGFR CAR by greater than or equal to 9X (FIG. 24).

[0832] Activation of Jurkat cells expressing the EGFR CAR activator and a HLA-A*02 ScFv LIR-1 based inhibitory receptor was also assayed using HeLa and SiHa cells as target cells. Wild type HeLa and SiHa cell lines express EGFR but not HLA-A*02 (SiHa WT and HeLa WT), but were transduced to express the HLA-A*02 inhibitory receptor target (SiHa A02 and HeLa A02). As can be seen in FIGS. 25A-25B, the HLA-A*02 ScFv LIR-1 based inhibitory receptor was able to shift the EGFR E_{MAX} by greater than 4X using SiHa target cells (FIG. 25A) and greater than 5X using HeLa target cells (FIG. 25B).

### Example 14: Activator and Blocker Pairs can Discriminate Between KRAS Alleles

[0833] MiHAs are peptides derived from proteins that contain nonsynonymous differences between alleles. Using KRAS as a model for MiHAs, the activator and blocker pairs were able to discriminate and respond to different KRAS variants using antigen binding domains specific to the KRAS G12V and KRAS G12D mutations.

[0834] Using the Jurkat-NFAT-luciferase activation studies described in Example 6 and T2 target cells, the ability of KRAS ScFv or Ftcr inhibitory LIR-1 based receptors to inhibit activation mediated by an activator KRAS CAR or TCR was assayed.

[0835] FIG. 27 shows that a KRAS G12V scFv blocker was able to inhibit activation of Jurkat cells by a KRAS G12D TCR (C-891) and shift the KRAS G12D E_{Max} by 14X. FIG. 28 shows a similar result with a reciprocal pair, a KRAS G12D ScFv blocker and a KRAS G12V TCR activator (C-913), where the inhibitor was able to shift the KRAS G12V E_{Max} by 8X.

[0836] FIG. 29 shows that a KRAS G12V Ftcr blocker was able to inhibit a KRAS G12D TCR. The inhibitor was able to shift the KRAS G12D E_{Max} by greater than 50X. In this case, constructs with a LIR-1 transmembrane domain and intracellular domain were included on both the alpha and beta chains of the inhibitory TCR (LIR-1 on alpha and beta), on the TCR alpha chain only (LIR-1 on alpha only), on the TCR beta chain only (LIR-1 on beta only), and a version with no LIR-1 ICD was included as a control (no LIR-1). In a reciprocal experiment, a KRAS G12D Ftcr blocker was able to inhibit a KRAS G12V activator TCR, shifting the KRAS G12V E_{Max} by greater than 500X.

[0837] Finally, this effect was dependent on the specific ligand binding domains, as pairs with an inhibitory receptor that had an irrelevant ScFv domain had little effect on activator E_{Max} (FIGS. 31A-31B).

[0838] Table 4 lists the KRAS ScFv and Ftcr sequences. All ScFvs were fused to a LIR-1 hinge, TM and ICD. All Ftcrs were fused to a LIR-1 TM and ICD.

TABLE 4
KRAS ScFv and Ftcr Sequences.

| C-02256 (Kp33A1101_H125 scFv): | C-02256 |
|---|---|
| QVQLVESGGGLVKPGGSLRLSCAASGFTFSDYYMSWIRQAPGKGLE | (Kp33A1101_H125 |
| WVSYISSSGSTIYYADSVKGRFTISRDNAKNSLYLQMNSLRAEDTAV | scFv) DNA |
| YYCARDFTRDYYYYYYMDVWGKGTTVTVSSGGGGSGGGGSGGG | Sequence: SEQ |
| GSGGDIQMTQSPSSLSASVGDRVTITCRASQSISSYLNWYQQKPGKA | ID NO: 229 |
| PKLLIYAASSLQSGVPSRFSGSGSGTDFTLTISSLQPEDFATYYCQQS | |
| YSTPLTFGGGTKVEIK (SEQ ID NO: 228) | |
| C-02257 (K14A11:01_V001_scFv): | C-02257 |
| QVTLRESGPALVKPTQTLTLTCTFSGFSLSTSGMCVSWIRQPPGKAL | (K14A11:01_V001_ |
| EWLALIDWDDDKYYSTSLKTRLTISKDTSKNQVVLTMTNMDPVDT | scFv) DNA |
| ATYYCARSYDELYYFDYWGQGTLVTVSSGGGGSGGGGSGGGGSG | Sequence: SEQ |
| GDIQMTQSPSSLSASVGDRVTITCRASQSISSYLNWYQQKPGKAPKL | ID NO: 231 |
| LIYAASSLQSGVPSRFSGSGSGTDFTLTISSLQPEDFATYYCQQSYSTP | |
| LTFGGGTKVEIK (SEQ ID NO: 230) | |
| C-002300 (K14A11:01 H001/L004_scFv): | C-002300 |
| QVTLRESGPALVKPTQTLTLTCTFSGFSLSTSGMCVSWIRQPPGKAL | (K14A11:01 |
| EWLALIDWDDDKYYSTSLKTRLTISKDTSKNQVVLTMTNMDPVDT | H001/L004_scFv) |
| ATYYCARSYDELYYFDYWGQGTLVTVSSGGGGSGGGGSGGGGSG | DNA |
| GDIQMTQSPSSLSASVGDRVTITCRASQSIWTSYLNWYQQKPGKAP | Sequence: SEQ |
| KLLIYAASSLQSGVPSRFSGSGSGTDFTLTISSLQPEDFATYYCQQSY | ID NO: 232 |
| STPLTFGGGTKVEIK | |
| (SEQ ID NO: 21890) | |
| C-002301 (K14A11:01 H001/L010 scFv); | C-002301 |
| QVTLRESGPALVKPTQTLTLTCTFSGFSLSTSGMCVSWIRQPPGKAL | (K14A11:01 |
| EWLALIDWDDDKYYSTSLKTRLTISKDTSKNQVVLTMTNMDPVDT | H001/L010 |
| ATYYCARSYDELYYFDYWGQGTLVTVSSGGGGSGGGGSGGGGSG | scFv) DNA |
| GDIQMTQSPSSLSASVGDRVTITCRASQSISSYLNWYQQKPGKAPKL | Sequence: SEQ |
| LIYAASSLQSGVPSRFSGSGSGTDFTLTISSLQPEDFATYYCQQSYST | ID NO: 233 |
| RLTFGGGTKVEIK (SEQ ID NO: 21891) | |
| C-002365 [pLenti 1 K33A1101_V002 TCRa T48C (G12D TRAV4- | C-002365 |
| 4/DV10*01)]: | [pLenti 1 |
| MQRNLGAVLGILWVQICWVRGDQVEQSPSALSLHEGTDSALRCNF | K33A1101_V002 |
| TTTMRSVQWFRQNSRGSLISLFYLASGTKENGRLKSAFDSKERRYST | TCRa T48C |
| LHIRDAQLEDSGTYFCAADSSNTGYQNFYFGKGTSLTVIPNIQNPEP | (G12D TRAV4- |
| AVYQLKDPRSQDSTLCLFTDFDSQINVPKTMESGTFITDKCVLDMK | 4/DV10*01)] |
| AMDSKSNGAIAWSNQTSFTCQDIFKETNATYPSSDVPCDATLTEKSF | DNA Sequence: |
| ETDMNLNFQNLS (SEQ ID NO: 234) | SEQ ID NO: |
| | 235 |
| C-002367 [pLenti 1 K33A1101_V002 TCRb S51C | C-002367 |
| (TRBV12-2*01)]: | [pLenti 1 |
| MSNTAFPDPAWNTTLLSWVALFLLGTSSANSGVVQSPRYIIKGKGE | K33A1101_V002 |
| RSILKCIPISGHLSVAWYQQTQGQELKFFIQHYDKMERDKGNLPSRF | TCRb S51C |
| SVQQFDDYHSEMNMSALELEDSAVYFCASSLTDPLDSDYTFGSGTR | (TRBV12- |
| LLVIEDLRNVTPPKVSLFEPSKAEIANKQKATLVCLARGFFPDHVEL | 2*01)] DNA |
| SWWVNGKEVHSGVCTDPQAYKESNYSYCLSSRLRVSATFWHNPRN | Sequence: |
| HFRCQVQFHGLSEEDKWPEGSPKPVTQNISAEAWGRADCGITSASY | SEQ ID NO: |
| QQGVLS | 237 |
| (SEQ ID NO: 236) | |
| C-002368 [pLenti 1 K33A1101_V002 TCRb S51C | C-002368 |
| (TRBV12-2*01)]: | [pLenti 1 |
| MSNTAFPDPAWNTTLLSWVALFLLGTSSANSGVVQSPRYIIKGKGE | K33A1101_V002 |
| RSILKCIPISGHLSVAWYQQTQGQELKFFIQHYDKMERDKGNLPSRF | TCRb S51C |
| SVQQFDDYHSEMNMSALELEDSAVYFCASSLTDPLDSDYTFGSGTR | (TRBV12- |
| LLVIEDLRNVTPPKVSLFEPSKAEIANKQKATLVCLARGFFPDHVEL | 2*01)] DNA |
| SWWVNGKEVHSGVCTDPQAYKESNYSYCLSSRLRVSATFWHNPRN | Sequence: SEQ |
| HFRCQVQFHGLSEEDKWPEGSPKPVTQNISAEAWGRADCGITSASY | ID NO: 238 |
| QQGVLS (SEQ ID NO: 21892) | |
| C-002369 [pLenti 1 Kp514A1101_V001 TCRa T48C (G12 V | C-002369 |
| TRAV3-3*01)]: | [pLenti 1 |
| MKTVTGPLFLCFWLQLNCVSRGEQVEQRPPHLSVREGDSAVITCTY | Kp514A1101_ |
| TDPNSYYFFWYKQEPGASLQLLMKVFSSTEINEGQGFTVLLNKKDK | V001 TCRa |
| RLSLNLTAAHPGDSAAYFCAVSGGTNSAGNKLTFGIGTRVLVRPDI | T48C (G12 V |
| QNPEPAVYQLKDPRSQDSTLCLFTDFDSQINVPKTMESGTFITDKCV | TRAV3-3*01)] |
| LDMKAMDSKSNGAIAWSNQTSFTCQDIFKETNATYPSSDVPCDATL | DNA Sequence: |
| TEKSFETDMNLNFQNLS | SEQ ID NO: |
| (SEQ ID NO: 239) | 240 |
| C-002371 [pLenti 1 Kp514A1101_V001 TCRb S51C (TRBV4*01)]: | C-002371 |
| MGCRLLSCVAFCLLGIGPLETAVFQTPNYHVTQVGNEVSFNCKQTL | [pLenti 1 |
| GHDTMYWYKQDSKKLLKIMFSYNNKQLIVNETVPRRFSPQSSDKA | Kp514A1101_ |
| HLNLRIKSVEPEDSAVYLCASSRDWGPAEQFFGPGTRLTVLEDLRN | V001 TCRb |
| VTPPKVSLFEPSKAEIANKQKATLVCLARGFFPDHVELSWWVNGKE | S51C |
| VHSGVCTDPQAYKESNYSYCLSSRLRVSATFWHNPRNHFRCQVQF | (TRBV4*01)] |
| HGLSEEDKWPEGSPKPVTQNISAEAWGRADCGITSASYHQGVLS | DNA Sequence: |
| (SEQ ID NO: 241) | SEQ ID NO: |
| | 242 |
| C-002372 [pLenti 1 Kp514A1101_V001 TCRb S51C (TRBV4*01)]: | C-002372 |
| MGCRLLSCVAFCLLGIGPLETAVFQTPNYHVTQVGNEVSFNCKQTL | [pLenti 1 |
| GHDTMYWYKQDSKKLLKIMFSYNNKQLIVNETVPRRFSPQSSDKA | Kp514A1101_ |
| HLNLRIKSVEPEDSAVYLCASSRDWGPAEQFFGPGTRLTVLEDLRN | V001 TCRb |
| VTPPKVSLFEPSKAEIANKQKATLVCLARGFFPDHVELSWWVNGKE | S51C |
| VHSGVCTDPQAYKESNYSYCLSSRLRVSATFWHNPRNHFRCQVQF | (TRBV4*01)] |
| HGLSEEDKWPEGSPKPVTQNISAEAWGRADCGITSASYHQGVLS | DNA Sequence: |
| (SEQ ID NO: 21893) | SEQ ID NO: |
| | 243 |

TABLE 4
Ftcr sequences fused to LIR-1 TM and no ICD as controls.

| C-002366 [pLenti 1 K33A1101_V002 TCRa T48C (G12D TRAV4- | C-002366 |
|---|---|
| 4/DV10*01)]: | [pLenti 1 |
| MQRNLGAVLGILWVQICWVRGDQVEQSPSALSLHEGTDSALRCNF | K33A1101_V002 |
| TTTMRSVQWFRQNSRGSLISLFYLASGTKENGRLKSAFDSKERRYST | TCRa T48C |
| LHIRDAQLEDSGTYFCAADSSNTGYQNFYFGKGTSLTVIPNIQNPEP | (G12D TRAV4- |
| AVYQLKDPRSQDSTLCLFTDFDSQINVPKTMESGTFITDKCVLDMK | 4/DV10*01)] |
| AMDSKSNGAIAWSNQTSFTCQDIFKETNATYPSSDVPCDATLTEKSF | DNA Sequence: |
| ETDMNLNFQNLS (SEQ ID NO: 21894) | SEQ ID NO: |
| | 244 |
| C-002370 [pLenti 1 Kp514A1101_V001 TCRa T48C (G12 V | C-002370 |
| TRAV3-3*01)]: | [pLenti 1 |
| MKTVTGPLFLCFWLQLNCVSRGEQVEQRPPHLSVREGDSAVITCTY | Kp514A1101_ |
| TDPNSYYFFWYKQEPGASLQLLMKVFSSTEINEGQGFTVLLNKKDK | V001 TCRa |
| RLSLNLTAAHPGDSAAYFCAVSGGTNSAGNKLTFGIGTRVLVRPDI | T48C (G12 V |
| QNPEPAVYQLKDPRSQDSTLCLFTDFDSQINVPKTMESGTFITDKCV | TRAV3-3*01)] |
| LDMKAMDSKSNGAIAWSNQTSFTCQDIFKETNATYPSSDVPCDATL | DNA Sequence: |
| TEKSFETDMNLNFQNLS (SEQ ID NO: 21895) | SEQ ID NO: |
| | 245 |

### Example 15: Characterization of TCRs Recognizing a MiHA-Y

[0839] TCR alpha and beta extracellular domains from Jb2.3 and P2A mouse TCRs were cloned into activator TCR constructs. Either the native mouse or human constant regions were used. EL5 cells loaded with mH-Y H-2D^{b} peptide KCSRNRQYL (SEQ ID NO: 246) were used as target cells to assay the activation of Jurkat cells transfected with the MiHA-Y TCRs (FIG. 32). As can be seen from FIG. 32, C-003121 supports robust Jurkat cell activation.

TABLE 5
Mouse miHA-Y TCR sequences with mouse or human constant regions

| | |
|---|---|
| C-003119 (H-Y TCRalpha P2A TCRbeta Jb2.3 mouse); | C-003119 |
| MFPVTILLLSAFFSLRGNSAQSVDQPDAHVTLSEGASLELRCSYSYSAA | (H-Y |
| PYLFWYVQYPGQSLQFLLKYITGDTVVKGTKGFEAEFRKSNSSFNLKK | TCRalpha |
| SPAHWSDSAKYFCALEGQDQGGSAKLIFGEGTKLTVSSPDIQNPEPAV | P2A |
| YQLKDPRSQDSTLCLFTDFDSQINVPKTMESGTFITDKTVLDMKAMDS | TCRbeta |
| KSNGAIAWSNQTSFTCQDIFKETNATYPSSDVPCDATLTEKSFETDMN | Jb2.3 mouse) |
| LNFQNLSVMGLRILLLKVAGFNLLMTLRLWSSRAKRSGSGATNFSLLK | DNA |
| QAGDVEENPGPMSNTAFPDPAWNTTLLSWVALFLLGTKHMEAAVTQ | Sequence: |
| SPRNKVAVTGGKVTLSCNQTNNHNNMYWYRQDTGHGLRLIHYSYGA | SEQ ID NO: |
| GSTEKGDIPDGYKASRPSQENFSLILELATPSQTSVYFCASGDNSAETL | 248 |
| YFGPGTRLTVLEDLRNVTPPKVSLFEPSKAEIANKQKATLVCLARGFFP | |
| DHVELSWWVNGKEVHSGVSTDPQAYKESNYSYCLSSRLRVSATFWH | |
| NPRNHFRCQVQFHGLSEEDKWPEGSPKPVTQNISAEAWGRADCGITSA | |
| SYHQGVLSATILYEILLGKATLYAVLVSGLVLMAMVKKKNS | |
| (SEQ ID NO: 247) | |
| C-003120 (H-Y TCRalpha T48C P2A H-Y TCRbeta Jb2.3 S57C | C-003120 |
| human); | (H- |
| MFPVTILLLSAFFSLRGNSAQSVDQPDAHVTLSEGASLELRCSYSYSAA | YTCRalpha |
| PYLFWYVQYPGQSLQFLLKYITGDTVVKGTKGFEAEFRKSNSSFNLKK | T48C P2A |
| SPAHWSDSAKYFCALEGQDQGGSAKLIFGEGTKLTVSSPYIQNPDPAV | H-Y |
| YQLRDSKSSDKSVCLFTDFDSQTNVSQSKDSDVYITDKCVLDMRSMD | TCRbeta |
| FKSNSAVAWSNKSDFACANAFNNSIIPEDTFFPSPESSCDVKLVEKSFET | Jb2.3 S57C |
| DTNLNFQNLSVIGFRILLLKVAGFNLLMTLRLWSSGSGATNFSLLKQA | human) DNA |
| GDVEENPGPMSNTAFPDPAWNTTLLSWVALFLLGTKHMEAAVTQSPR | Sequence: |
| NKVAVTGGKVTLSCNQTNNHNNMYWYRQDTGHGLRLIHYSYGAGST | SEQ ID NO: |
| EKGDIPDGYKASRPSQENFSLILELATPSQTSVYFCASGDNSAETLYFGP | 250 |
| GTRLTVLEDLKNVFPPEVAVFEPSEAEISHTQKATLVCLATGFYPDHVE | |
| LSWWVNGKEVHSGVCTDPQPLKEQPALNDSRYCLSSRLRVSATFWQN | |
| PRNHFRCQVQFYGLSENDEWTQDRAKPVTQIVSAEAWGRADCGFTSE | |
| SYQQGVLSATILYEILLGKATLYAVLVSALVLMAMVKRKDSRG (SEQ | |
| ID NO: 249) | |
| C-003121 (H-Y TCRalpha P2A TCRbeta Jb2.3L mouse); | C-003121 |
| MFPVTILLLSAFFSLRGNSAQSVDQPDAHVTLSEGASLELRCSYSYSAA | (H-Y |
| PYLFWYVQYPGQSLQFLLKYITGDTVVKGTKGFEAEFRKSNSSFNLKK | TCRalpha |
| SPAHWSDSAKYFCALEGQDQGGSAKLIFGEGTKLTVSSPDIQNPEPAV | P2A |
| YQLKDPRSQDSTLCLFTDFDSQINVPKTMESGTFITDKTVLDMKAMDS | TCRbeta |
| KSNGAIAWSNQTSFTCQDIFKETNATYPSSDVPCDATLTEKSFETDMN | Jb2.3L |
| LNFQNLSVMGLRILLLKVAGFNLLMTLRLWSSRAKRSGSGATNFSLLK | mouse) DNA |
| QAGDVEENPGPMSNTAFPDPAWNTTLLSWVALFLLGTKHMEAAVTQ | Sequence: |
| SPRNKVAVTGGKVTLSCNQTNNHNNMYWYRQDTGHGLRLIHYSYGA | SEQ ID NO: |
| GSTEKGDIPDGYKASRPSQENFSLILELATPSQTSVYFCASGDNSAETL | 252 |
| YFGPGTRLLVLEDLRNVTPPKVSLFEPSKAEIANKQKATLVCLARGFFP | |
| DHVELSWWVNGKEVHSGVSTDPQAYKESNYSYCLSSRLRVSATFWH | |
| NPRNHFRCQVQFHGLSEEDKWPEGSPKPVTQNISAEAWGRADCGITSA | |
| SYHQGVLSATILYEILLGKATLYAVLVSGLVLMAMVKKKNS (SEQ ID | |
| NO: 251) | |
| C-003122 (H-Y TCRalpha T48C P2A H-Y TCRbeta Jb2.3L S57C | C-003122 |
| human); | (H-Y |
| MFPVTILLLSAFFSLRGNSAQSVDQPDAHVTLSEGASLELRCSYSYSAA | TCRalpha |
| PYLFWYVQYPGQSLQFLLKYITGDTVVKGTKGFEAEFRKSNSSFNLKK | T48C P2A |
| SPAHWSDSAKYFCALEGQDQGGSAKLIFGEGTKLTVSSPYIQNPDPAV | H-Y |
| YQLRDSKSSDKSVCLFTDFDSQTNVSQSKDSDVYITDKCVLDMRSMD | TCRbeta |
| FKSNSAVAWSNKSDFACANAFNNSIIPEDTFFPSPESSCDVKLVEKSFET | Jb2.3L S57C |
| DTNLNFQNLSVIGFRILLLKVAGFNLLMTLRLWSSGSGATNFSLLKQA | human) DNA |
| GDVEENPGPMSNTAFPDPAWNTTLLSWVALFLLGTKHMEAAVTQSPR | Sequence: |
| NKVAVTGGKVTLSCNQTNNHNNMYWYRQDTGHGLRLIHYSYGAGST | SEQ ID NO: |
| EKGDIPDGYKASRPSQENFSLILELATPSQTSVYFCASGDNSAETLYFGP | 254 |
| GTRLLVLEDLKNVFPPEVAVFEPSEAEISHTQKATLVCLATGFYPDHVE | |
| LSWWVNGKEVHSGVCTDPQPLKEQPALNDSRYCLSSRLRVSATFWQN | |
| PRNHFRCQVQFYGLSENDEWTQDRAKPVTQIVSAEAWGRADCGFTSE | |
| SYQQGVLSATILYEILLGKATLYAVLVSALVLMAMVKRKDSRG (SEQ | |
| ID NO: 253) | |

### Example 16: Minor Histocompatibility Antigen HA-1 Inhibitory Receptors

[0840] T2 cells carrying HLA-A*02 and A*11 class I alleles were loaded with a titration of A*02-specific NY-ESO-1 peptide in the absence or presence of 50 μM A*02-specific HA-1 blocker peptides. Activation of Jurkat effector cells expressing either an NY-ESO-1 TCR or an NY-ESO-1 TCR and HA-1 Ftcr was assayed as described above (see Example 6). FIG. 33A shows that in the absence of blocker peptide, sensitivity of the NY-ESO-1 TCR is not affected by the presence of HA-1 Ftcr. In the presence of HA-1(H) blocker peptide, NY-ESO-1 and HA-1(H) peptides compete for the same HLA-A*02 allele causing an EC50 right shift of ˜30× (solid squares to dashed squares). Yet, an additional right shift in activity of ˜10× is observed in the presence of HA-1 Ftcr blocker (dashed squares to dashed circles). In addition, Emax is shifted downward 1.5× (solid circles to dashed circles). FIG. 33B shows that in the presence of the non-specific, allelic variant HA-1(R) blocker peptide, essentially no blocking is observed, suggesting blocking is specific to a single amino acid. In general, since NY-ESO-1 loads into HLA-A*02 more efficiently than HA-1(R) (see FIG. 35), there is also only a 3-5× right shift observed in the presence of HA-1(R) blocker peptide (solid to dashed lines).

[0841] Peptide sequences were as follows:

NY-ESO-1 =
(SEQ ID NO: 255)
SLLMWITQV,
HA-1(H) =
(SEQ ID NO: 187)
VLHDDLLEA,
HA-1(R) =
(SEQ ID NO: 256)
VLRDDLLEA.

[0842] HA-1 Ftcr can also block a KRAS TCR specifically in the presence of HA-1(H) peptide. T2 cells carrying HLA-A*02 and A*11 class I alleles were loaded with a titration of A*11-specific KRAS peptide in the absence or presence of 50 μM A*02-specific HA-1 blocker peptides. Activation of Jurkat effector cells expressing either an NY-ESO-1 TCR or an NY-ESO-1 TCR and HA-1 Ftcr was assayed as described above (see Example 6). FIG. 34A shows that in the absence of blocker peptide, sensitivity of the KRAS TCR is not affected by the presence of HA-1 Ftcr. In the presence of HA-1(H) blocker peptide, HA-1 Ftcr blocks KRAS TCR by ˜5× in activity (solid circles to dashed circles). In addition, Emax is shifted downward 2.7× (solid circles to dashed circles). FIG. 34B shows that in the presence of the non-specific, allelic variant HA-1(R) blocker peptide, essentially no blocking is observed, suggesting blocking is specific to a single amino acid. In general, since KRAS and HA-1(H) or HA-1(R) do not load into the same alleles, there is no significant right shift observed in the presence of blocker peptide (solid to dashed lines).

[0843] Loading of the NY-ESO, HA-1(H) and HA-1(R) peptides by T2 cells was compared using BB7.2 staining, which specifically recognizes peptide-loaded HLA-A*02 class I allelic products, and quantified using flow cytometry. FIG. 35 shows that loading of HLA-A*02− specific NY-ESO-1 and HA-1(H) peptides is very similar in T2 cells. The allelic variant, HA-1(R), loads slightly less efficiently than HA-1(H) and NY-ESO-1 peptides.

[0844] HA-1(H) Ftcr sequences set forth in SEQ ID NOs: 189, 191, 192, 195, and 196 (amino acid) and 190, 192, 194, 197, and 198 (nucleic acid), NY-ESO-1 and KRAS TCR are shown in Table 6 below.

TABLE 6
NY-ESO-1 and KRAS TCR sequences

| | |
|---|---|
| C-000063 pLenti 1 NY-ESO1 1G4 TCRalpha T95L, S96Y, T48C | C-000063 |
| P2A TCRbeta S57C: | pLenti 1 |
| METLLGLLILWLQLQWVSSKQEVTQIPAALSVPEGENLVLNCSFTDSAI | NY-ESO1 |
| YNLQWFRQDPGKGLTSLLLIQSSQREQTSGRLNASLDKSSGRSTLYIAA | 1G4 |
| SQPGDSATYLCAVRPLYGGSYIPTFGRGTSLIVHPYIQNPDPAVYQLRDS | TCRalpha |
| KSSDKSVCLFTDFDSQTNVSQSKDSDVYITDKCVLDMRSMDFKSNSAV | T95L, S96Y, |
| AWSNKSDFACANAFNNSIIPEDTFFPSPESSCDVKLVEKSFETDTNLNFQ | T48C P2A |
| NLSVIGFRILLLKVAGFNLLMTLRLWSSGSGATNFSLLKQAGDVEENPG | TCRbeta |
| PMSIGLLCCAALSLLWAGPVNAGVTQTPKFQVLKTGQSMTLQCAQDM | S57C DNA |
| NHEYMSWYRQDPGMGLRLIHYSVGAGITDQGEVPNGYNVSRSTTEDFP | Sequence: |
| LRLLSAAPSQTSVYFCASSYVGNTGELFFGEGSRLTVLEDLKNVFPPEV | SEQ ID NO: |
| AVFEPSEAEISHTQKATLVCLATGFYPDHVELSWWVNGKEVHSGVCTD | 258 |
| PQPLKEQPALNDSRYCLSSRLRVSATFWQNPRNHFRCQVQFYGLSEND | |
| EWTQDRAKPVTQIVSAEAWGRADCGFTSESYQQGVLSATILYEILLGK | |
| ATLYAVLVSALVLMAMVKRKDSRG (SEQ ID NO: 257) | |
| C-000891 pLenti 1 K33A1101_V002 TCR (G12D TRAV4-4/ | C-000891 |
| DV10*01/BV12-2*01): | pLenti 1 |
| MQRNLGAVLGILWVQICWVRGDQVEQSPSALSLHEGTDSALRCNFTTT | K33A1101_ |
| MRSVQWFRQNSRGSLISLFYLASGTKENGRLKSAFDSKERRYSTLHIRD | V002 TCR |
| AQLEDSGTYFCAADSSNTGYQNFYFGKGTSLTVIPNIQNPEPAVYQLKD | (G12D |
| PRSQDSTLCLFTDFDSQINVPKTMESGTFITDKTVLDMKAMDSKSNGAI | TRAV4- |
| AWSNQTSFTCQDIFKETNATYPSSDVPCDATLTEKSFETDMNLNFQNLS | 4/DV10*01/ |
| VMGLRILLLKVAGFNLLMTLRLWSSRAKRSGSGATNFSLLKQAGDVEE | BV12-2*01) |
| NPGPMSNTAFPDPAWNTTLLSWVALFLLGTSSANSGVVQSPRYIIKGKG | DNA |
| ERSILKCIPISGHLSVAWYQQTQGQELKFFIQHYDKMERDKGNLPSRFS | Sequence: |
| VQQFDDYHSEMNMSALELEDSAVYFCASSLTDPLDSDYTFGSGTRLLVI | SEQ ID NO: |
| EDLRNVTPPKVSLFEPSKAEIANKQKATLVCLARGFFPDHVELSWWVN | 260 |
| GKEVHSGVSTDPQAYKESNYSYCLSSRLRVSATFWHNPRNHFRCQVQF | |
| HGLSEEDKWPEGSPKPVTQNISAEAWGRADCGITSASYQQGVLSATILY | |
| EILLGKATLYAVLVSTLVVMAMVKRKNS (SEQ ID NO: 259) | |

### Example 17: Ratios of Activator and Inhibitor Peptides

[0845] The NFAT-luciferase signal of Jurkat cells transfected with either activator MAGE-A3 CAR alone or in combination with NY-ESO-1 ScFv LIR1 blocker was measured after 6 hours of co-culture with activator and blocker peptide-loaded T2 cells. FIG. 36A shows the response of Jurkat cells co-cultured with T2 cells that were loaded with titrated amounts of activator MAGE-A3 peptide and a fixed concentration of blocker NY-ESO-1 peptide. FIG. 36B shows the response of Jurkat to T2 cells that were loaded with titrated amounts of blocker NY-ESO-1 peptide and a fixed concentration of activator MAGE-A3 peptide that was above the Emax concentration (˜0.1 μM). FIG. 36C shows x-value blocker NY-ESO-1 peptide concentrations from FIG. 36B that were normalized to the constant activator MAGE peptide concentrations used for each curve and plotted on the x-axis. The ratio of blocker peptide to activator peptide required for 50% blocking (IC50) are indicated for each curve. The B:A peptide ratio required is less than 1 indicating that, for this pair of activator CAR and blocker, similar (or fewer) blocker pMHC antigens are required on target cells to block activator pMHC antigens. Blocking is possible at pMHC antigen densities that are similar to those that generate responses in activating pMHC CARs.

### Example 18: Optimization of Specific Receptor Pairs

[0846] T cells transfected with either an EGFR ScFv CAR activator (CT-479, CT-482, CT-486, CT-487 or CT-488, as indicated in FIG. 37), or with EGFR ScFv CAR activator and an HLA-A*02 PA2.1 ScFv LIR1 inhibitor (C1765) were co-cultured with HeLa target cells. Wild type HeLa cell lines express EGFR but not HLA-A*02, but were transduced to express the HLA-A*02 inhibitory receptor target. Cells were co-cultured at a 1:1 ratio of effector to target (E:T). In the lower right of FIG. 37, effector cell receptor expression is indicated first, while HeLa cell expression is in paranetheses. As can be seen from FIG. 37, a different degree of blocking is observed when the same HLA-A*02 PA2.1 ScFv LIR1 inhibitor was used with different EGFR activator receptors.

### Example 19: Inhibitory Receptors Reversibly Decrease Surface Level of Activator Receptors in T Cells

[0847] Primary T cells from two HLA-A*02 negative donors were transduced with an EGFR ScFv CAR activator (CT-479, CT-482, CT-486, CT-487 or CT-488) and an HLA-A*02 PA2.1 ScFv LIR1 inhibitor (C1765). Transduced cells were enriched by FACS sorting on the blocker and activator receptors, or by double column purification on the blocker and activator receptors. Transduced T cells were co-cultured with HeLa target cells. Wild type HeLa cell lines express EGFR but not HLA-A*02, but were transduced to express the HLA-A*02 inhibitory receptor target. Cells were co-cultured at a 1:1 ratio of effector to target (E:T). Surface expression of the EGFR CAR activator was assayed after 120 hours using labeled peptides that bound the activator and blocker receptors, and fluorescence activated cell sorting. The change in activator surface level following co-culture with HeLa cells expressing both activator and blocker ligands corresponded to the T cells' ability to kill target cells (compare FIG. 37 and FIG. 38).

[0848] T cells expressing the CT-482 EGFR ScFv CAR activator and HLA-A*02 PA2.1 ScFv LIR1 inhibitor (C1765) combination, were co-cultured with HeLa cells expressing EGFR (Target A), HLA-A*02 (Target B), a combination of EGFR and HLA-A*02 on the same cell (Target AB), a mixed population of HeLa cells expressing Target A and Target AB on different cells, or a mixed population of HeLa cells expressing Target B and Target AB on different cells (FIGS. 39A-39B). T cells were cultured with HeLa target cells at a ratio of 1:1 effector cell to target cell. When T cells were co-cultured with a Target A plus Target AB population of HeLa cells, levels of activator decreased, then recovered (FIG. 39A). Furthermore, the activator and blocker antigens must be present together on the same cell to trigger activator surface expression loss on effector T cells. In contrast to the activator, blocker expression was largely unchanged (FIG. 39B).

[0849] FIG. 40 shows a schematic for an experiment to determine if loss of expression of activator receptor by T cells was reversible. T cells expressing EGFR ScFv CAR activator receptor (CT-487) and HLA-A*02 PA2.1 ScFv LIR1 (C1765) inhibitor receptor were co-cultured with HeLa target cells expressing both the activator and blocker receptor targets (AB). Following 3 days co-culture, HeLa cells were removed using an anti-EGFR column, and the T cells were either stained for the activator and inhibitor receptors, or co-cultured with HeLa cells expressing EGFR activator target only for an additional 3 days. After the additional 3 days co-culture, HeLa cells were again removed using an anti-EGFR column, and the T cells were either stained for the activator and inhibitor receptors, or were co-cultured for an additional 3 days with HeLa cells expressing EGFR activator target only, or both the activator and blocker targets (AB), before staining. T cells were assayed for the presence of activator and inhibitor receptors (stained) using labeled EGFR and A2 probes, and the levels of receptor expression were quantified using fluorescence activated cell sorting. Results of the experiment are shown in FIGS. 41A-41B. As shown in FIGS. 41A-41B, co-culture of T cells with HeLa cells expressing both activator and inhibitor targets reduces EGFR activator staining (FIGS. 41A-41B, left panel). When T cells are co-cultured with HeLa cells expressing activator (Target A only) at round 2, expression of EGFR activator increases. Thus, activator surface loss is reversible and tracks with T cell cytotoxicity.

### Example 20: Reversible Repression of Graft-Versus-Host Response by an Inhibitory Receptor Specific to an MHC-I Ligand

### Methods

### Cell Culture

[0850] Raji cells were maintained as suggested by ATCC. “Normal” Raji cells were made by transducing Raji cells with HLA-A*02 lentivirus at a MOI of 5. HLA-A*02-positive Raji cells were sorted using a FACSMelody Cell Sorter (BD).

### Plasmid Construction

[0851] The CD19 CAR was created by fusing the FMC63-derived (Nicholson et al., 1997) scFv to the CD8 hinge, CD28 transmembrane region and CD28-4-1BB-CD3zeta signaling domains. The HLA-A*02-responsive inhibitory construct was created by fusing the scFv LBD of monoclonal antibody PA2.1 to the hinge, transmembrane region, and intracellular domain of LILRB1 (LIR-1). Gene segments were combined using Golden Gate cloning and inserted downstream of a human EFla promoter contained in a lentiviral expression plasmid.

### Primary T Cell Transduction, Expansion, and Enrichment

[0852] Frozen PBMCs were thawed in 37° C. water bath and cultured at 1e6 cells/mL in LymphoONE (Takara) with 1% human serum and activated using 1:100 of T cell TransAct (Miltenyi) supplemented with IL-2 (100 IU/mL). After 24 hours, lentivirus was added to PBMCs at a MOT of 5. PBMCs were cultured for 2-3 additional days to allow cells to expand under TransAct stimulation. Post expansion, activator and blocker transduced primary T cells were enriched using anti-PE microbeads (Miltenyi) according to manufacturer's instructions. Briefly, primary T cells were incubated with CD19-Fc (R&D Systems) at 1:100 dilution for 30 minutes at 4° C. in MACS buffer (0.5% BSA+2 mM EDTA in PBS). Cells were washed 3 times in MACS buffer and incubated in secondary antibody (1:200) for 30 minutes at 4° C. in MACS buffer. Cells were then incubated in anti-PE microbeads and passed through the LS column (Miltenyi).

### Primary T Cell In Vitro Cytotoxicity Studies

[0853] Enriched primary T cells were incubated with 2e3 WT Raji cells (“tumor” cells) or HLA-A*02 transduced Raji cells (“normal” cells) at an effector:target ratio of 3:1 in the presence of 100 IU/mL. WT “tumor” Raji cells stably express GFP and renilla luciferase (Biosettia), and HLA-A*02 “normal” Raji cells stably express RFP and firefly luciferase (Biosettia). For reversibility studies, enriched primary T cells were cocultured with “normal” or “tumor” Raji cells for 3 days. After 3 days, T cells were separated from remaining Raji cells using CD19 negative selection and reseeded with fresh “normal” or “tumor” Raji cells. In separate wells, live luciferase-expressing Raji cells were quantified using a Dual-Luciferase Reporter Assay System (Promega) at 72 hrs. Reversibility was assessed for 7 rounds, oscillating between exposure to “normal” or “tumor” target cells.

[0854] This example demonstrates that the graft-versus-host response is reversibly suppressed by an inhibitory receptor specific to an MHC-I. Jurkat cells engineered to express either an anti-CD19 CAR alone or an anti-CD19 CAR (“CD19-CAR”) and an inhibitory receptor specific to HLA-A*02 (“Tmod”) were generated, as summarized in Table 7.

TABLE 7

| | Activatory Receptor | Inhibitory Receptor | Activity |
|---|---|---|---|
| “UTD” | Endogenous TCRs | N/A | Gradual buildup of T cell |
| | reactive to alloantigens | | response to allogeneic HLA on |
| | | | Raji cells (mimics GvHD) |
| | | | causes increased cytoxicity as |
| | | | the rounds progress |
| “CD19- | Chimeric antigen | N/A | CD19-specific CTL response is |
| CAR” | receptor specific to | | added to the allogeneic |
| | CD19 | | response, causing high |
| | | | cytotoxicity of Raji cells at each |
| | | | round |
| “Tmod” | Chimeric antigen | Chimeric antigen | No anti-CD19 response in the |
| | receptor specific to | receptor specific to | presence of HLA-A*02-positive |
| | CD19 | HLA-A*02 with | Raji cells (Rounds 1 and 3); |
| | | intracellular domain | control/mitigation of allogeneic |
| | | from LILRBI | response during each round |

[0855] Results are shown in FIG. 43. FIG. 43 depicts the cytotoxic T-cell lymphocyte (CTL) response of engineered effector T cells over time, with multiple rounds of primary T-cell transfer. As can be seen in FIG. 43, the CTL response is suppressed by normal cells (rounds 1, 3, 5 and 7). Exposure to tumor cells (rounds 2, 4, and 6) activates the CTL response. Surprisingly, the inhibitory receptor also suppresses the allogeneic response. This is visible in the comparison between untransduced donor T cells, whose cytotoxicity is stimulated by the mismatched HLA class I haplotype of the donor T cells and the target cells (Raji). In contrast, T cell expressing the activator and inhibitor receptor pair (green bars) show an inhibited allogeneic response to Raji target cells compared to untransduced (UTD, blue bars) cells. Note that this experiment was conducted in high IL-2 (300 Units/mL), and cell groups expressing the activator and inhibitor receptor combination have up to 10% cells that do not express the inhibitory receptor. This may explain diminished control of the allogeneic response by the inhibitory receptor over time.

### Example 21: gRNA Targeting Sequences

[0856] In order to select guide RNAs for targeting HLA-A alleles, the inventors retrieved all gRNAs from a published database of gRNAs that target the HLA-A and meet the requirements for use of the Streptococcus pyogenes Cas9 (SpCas9) nucleic acid guided endonuclease (Xu et al. Cell Stem Cell. 24:P566-578 (2019)). A computational approach was used to progressively filter putative gRNAs (FIG. 45). A total of 7,955 gRNA putative targeting sequences were retrieved. The gRNA candidates were analyzed and filtered to identify only those which have the HLA-A*02:01:01 allele as a target. This was accomplished using the GPP sgRNA designer algorithm publicly available from the Broad Institute, using as input the genetic locus harboring the HLA-A*02:01:01 allele retrieved from the International Immunogenetics Information System®. A total of ˜737 sequences from the initial 7,955 putative sequences were identified that target the HLA-A*02:01:01 allele. On-target efficacy scores were generated for the set of 737 targeting sequences to further reduce the number of putative targeting sequences to those with high-efficacy and bind coding DNA sequences in the HLA-A*02:01:01 allele. Efficacy scores were generated using the Azimuth 2.0 algorithm based on rules described previously (Doench et al. Nature Biotechnology. 34:184-191 (2016)). The set was reduced by removing any sequences with an on-target efficacy score of less than 0.5 and predicted to not target the coding DNA sequence of HLA-A*02 alleles. Applying this filter resulted in 120 putative sequences. Finally the putative sequences predicted to target fewer than 1000 HLA-A*02 allele variants were filtered out. Applying this filter resulted in ˜66 targeting sequences to select from for experimental characterization.

### Example 22: Putative gRNA Targeting Sequences Reduce Class I HLA Expression

[0857] gRNA-mediated knockout of HLA-A, HLA-A alleles, HLA-B, HLA-C, and HLA-G for 16 of the putative targeting sequences was experimentally determined in Jurkat cells and primary T cells. Table 8 shows the 16 targeting sequence candidates, their designation for the characterization experiment, and the percent knockout of HLA-A*02 or Class I HLA polypeptides (HLA-A, HLA-B, HLA-C, and HLA-G expression) in Jurkat cells.

TABLE 8
Targeting Sequences and percent knockout for
HLA-A*02 and Class I HLA in Jurkat cells.

| | SEQ ID | HLA-A*02 | Class I HLA |
|---|---|---|---|
| Designation | NO | % KO | % KO |
| gRNA-1 | 426 | 66.4 | 30.1 |
| gRNA-8 | 394 | 59.2 | 24.4 |
| gRNA-9 | 407 | 68.2 | 50.5 |
| gRNA-10 | 440 | 62.7 | 41.8 |
| gRNA-11 | 438 | 57.7 | 50.4 |
| gRNA-12 | 414 | 52.0 | 17.3 |
| gRNA-13 | 408 | 55.7 | 61.7 |
| gRNA-14 | 433 | 66.9 | 14.3 |
| gRNA-15 | 435 | 39.0 | 10.7 |
| gRNA-16 | 423 | 76.1 | 13.4 |
| gRNA-17 | 448 | 87.6 | 30.4 |
| gRNA-18 | 451 | 66.1 | 14.3 |
| gRNA-19 | 454 | 76.0 | 12.1 |
| gRNA-20 | 429 | 77.2 | 13.2 |
| gRNA-21 | 422 | 51.5 | 33.4 |
| gRNA-22 | 421 | 63.0 | 79.0 |

[0858] Jurkat cells expressing high levels of the HLA-A*02 allele were transfected with the putative targeting sequences and the Synthego 80 nucleotide SpCas9 scaffold. Jurkat cells were stained with fluorescently labeled anti-HLA-A*02 (HLA-A*02 staining) or a fluorescently labeled antibody that binds HLA-A/B/C (Class I HLA staining), followed by FACS (Table 8). Jurkat cells transfected with the putative targeting sequences and stained with the anti-HLA-A*02 antibody showed levels of HLA-A*02 knockout ranging from a low of 38% (gRNA-15) to a high of 87.6% (gRNA-17). Jurkat cells transfected with the putative targeting sequences and subject to Class I HLA staining showed knockout of HLA-A/B/C ranging from 10.7% gRNA-15 to 79% (gRNA-22). Indel analysis was performed on the Jurkat cells (FIG. 46), and showed that percent indel correlated with the observations of percent HLA knockout determined by FACS.

[0859] To determine the gRNAs effects on Class I HLA genes on primary T cells, primary peripheral blood mononuclear cells (PBMCs) were collected and activated. After one day, when applicable, PBMCs were transduced with polynucleotides encoding activating CAR and HLA-A*02 blocker, followed by transfection with the putative targeting sequences and the Synthego 80 nucleotide SpCas9 scaffold. Primary T cells were stained with fluorescently labeled anti-HLA-A*02 (HLA-A*02 staining) or a fluorescently labeled antibody that binds HLA-A/B/C (Class I HLA staining), followed by FACS (FIG. 46). Several HLA targeting sequences, including gRNA-8 and gRNA-16, provide robust HLA-A*02 or HLA-A knockout with wide allele coverage and low off-targets. At least one targeting sequence, gRNA-13, shows broad knockout of HLA alleles as demonstrated by decreased staining with both HLA-A*02 staining antibodies and Class I HLA staining antibodies.

### Example 23: gRNA-Mediated Knockdown of HLA-A*02 Increases Blocker Receptor Availability in HLA-A*02 Positive Donors

[0860] The ability of gRNA mediated knockout of HLA-A*02 alleles to increase availability of blocker ligand binding domain (LBD) was determined in T cells derived from three HLA-A*02 positive donors (FIG. 47). Primary T cells were collected from the three HLA-A*02 positive donors (D A2-16, D5886, and D 1042). One HLA-A*02 negative donor (D 4809) was used as a control. Donor T cells were transduced with CAR activator and HLA-A*02 blocker receptors. One day following transduction, T cells were either transfected with gRNA-16 to knockout HLA-A*02 or were in the No CRISPR negative control group. Cells were stained using a fluorescently labeled pMHC probe (A*02 probe binding) specific to binding HLA-A*02. Increased staining was observed in the HLA-A*02 positive cells transfected with gRNA-16, indicating that knockdown of the HLA-A*02 gene increased the capacity of blocker receptors to bind the target ligand. These results suggest that endogenous expression of HLA-A*02 interferes with the HLA-A*02-specific blocker receptor ligand binding capacity, and that knockout of endogenous HLA-A*02 reverses the effect. Thus, gRNA-mediated knockout of endogenous HLA-A*02 in immune cells expressing an HLA-A*02-specific blocker receptor can reduce autocrine interference or activation of the blocker receptor (FIG. 47).

### Example 24: Illustrative Methods of the Disclosure

### CRISPR Materials and Methods

### Cell Culture

[0861] Jurkat cells encoding an NFAT Luciferase reporter were maintained in RPMI media supplemented with 10% FBS, 1% Pen/Strep and 0.4 mg/mL G418/Geneticin. A2+ Jurkat were made by transducing Jurkat NFAT luciferase cells with HLA-A*02 lentivirus (custom lentivirus, Alstem) at a MOI of 5. HLA-A*02-positive cells were sorted using a FACSMelody Cell Sorter (BD).

### Jurkat Cell Transfection

[0862] Jurkat cells were transfected with Cas9/sgRNA complexes using 100 uL format Neon electroporation system (Thermo Fisher) according to manufacturer's protocol using the following settings: 3 pulses, 1500V, 10 msec. Transfections were performed with 20 pmol Cas9 2NLS nuclease (Synthego) and 130 pmol sgRNA (Synthego) per 1 million cells which were pre-incubated for 15 minutes at room temperature prior to transfection. Transfected cells were recovered RPMI media supplemented with 20% heat-inactivated FBS and 0.1% Pen/Strep.

Primary T cell transduction and Transfection

[0863] Frozen PBMCs were thawed in 37° C. water bath and cultured at 1e6 cells/mL in LymphoONE (Takara) with 1% human serum and activated using 1:100 of T cell TransAct (Miltenyi) supplemented with IL-2 (300 IU/mL). After 24 h, if applicable, lentivirus was added to PBMCs at MOI=5. A and B modules were simultaneously co-transduced at a MOI=5 for each lentivirus. 24 h later, PBMCs were transfected with Cas9/sgRNA complexes using 4D-Nucleofector (Lonza) according to the manufacturer's protocol using the EO-115 program. Transfections were performed with 20 pmol Cas9 2NLS nuclease (Synthego) and 130 pmol sgRNA (Synthego) per 1 million cells which were pre-incubated for 15 minutes at room temperature prior to transfection. Transfected cells were recovered in LymphoONE (Takara) with 1% human serum and IL-2 (300 IU/ml)

[0864] For gRNA screening studies, Jurkat or primary T cells were stained 4 days after Cas9/sgRNA transfection with BB7.2 antibody (Biolegend) and/or W6/32 antibody (BD Biosciences) for 30 minutes at 4° C. to assess knockout efficiency. To evaluate blocker availability to bind HLA-A*02 antigen Jurkat cells were stained with 10 ug/mL streptavidin-PE-HLA-A*02-pMHC or streptavidin-APC-HLA-A*02-pMHC tetramer for 30 minutes at 4° C. in PBS with 1% BSA and characterized by flow cytometry (BD FACSCanto II).

### Example 25: Selection of Interfering RNA Sequences Targeting the HLA Gene

[0865] In order to select guide nucleic acids for targeting the HLA-A*02:01:01:01 mRNA, all possible 18 bp, 19 bp, 20 bp, 21 bp, and 22 bp transcribed sequences corresponding to HLA-A*02:01:01:01 mRNA were determined, yielding 8397 sequences. From this set of potential target sequences, those containing GC content less than 25% or greater than or equal to 60% were excluded, resulting in 3586 potential target sequences. From this set of potential target sequences, those with runs of 4 or more of the same base in a row or a run of 7 C or G bases in a row were removed, resulting in 3101 potential target sequences. Next, the sequences were analyzed by identifying favorable characteristics identified by computational tools, such as the GPP RNAi Designer (Broad Institute), and similar favorable characteristics. The final set of potential targets included 278 sequences that can be used to design interfering RNAs that target the HLA-A*02:01:01:01 mRNA transcript for degradation through RNA interference. Illustrative alignments between shRNAs with a complementary sequence to the identified targets of the analysis are shown in FIG. 48.

### Example 26: shRNA-Mediated Reduction of HLA-A*02 Cell Surface Expression

[0866] The effect of shRNA targeting the coding sequence (CDS) of the HLA-A*02:01:01:01 mRNA transcript on HLA-A*02 surface protein expression was assessed.

[0867] Jurkat cells expressing HLA-A*02 were transfected using 100 uL format Neon electroporation system (Thermo Fisher) according to manufacturer's protocol using the following settings: 3 pulses, 1500V, 10 msec. Co-transfections were performed with 200 ng of U6-shRNA plasmids and 200 ng of plasmid expressing EGFR as a transfection marker per 1 million cells. Transfected cells were recovered in RPMI media supplemented with 20% heat-inactivated FBS and 0.1% Pen/Strep.

[0868] 4 days following transfection, cells were stained for HLA-A*02 expression with BB7.2 antibody (Biolegend) and anti-EGFR antibody (Biolegend) for 30 minutes at 4° C. to assess knockdown efficiency.

[0869] The results are shown in FIG. 49. The histograms show staining for either HLA-A*02, and corresponding quantification as % expression in control cells. The results indicate that several of the shRNA candidates were able to reduce expression of HLA-A*02 by over 50% compared to control cells. In particular, shRNA-12 showed a substantial decrease exceeding 90% knockdown compared to control cells.

[0870] These results indicate the identified shRNA targeting the CDS of the HLA-A*02:01:01:01 mRNA transcript reduces expression of HLA-A*02 surface protein in immune cells.

### Example 27: shRNA-Mediated Reduction of HLA Class I Cell Surface Expression

[0871] The effect of shRNA targeting the 5′ or 3′ untranslated region (UTR) of the HLA-A*02:01:01:01 mRNA transcript on HLA Class I surface protein expression was assessed.

[0872] Jurkat cells were transfected using 100 uL format Neon electroporation system (Thermo Fisher) according to manufacturer's protocol using the following settings: 3 pulses, 1500V, 10 msec. Co-transfections were performed with 1 μg of U6-shRNA plasmids and 100 ng of plasmid expressing green fluorescent protein (GFP) as a transfection marker per 1 million cells. Transfected cells were recovered in RPMI media supplemented with 20% heat-inactivated FBS and 0.1% Pen/Strep.

[0873] 4 days following transfection, cells were stained for HLA Class I expression with W6/32 antibody (BD Biosciences) for 30 minutes at 4° C. to assess knockdown efficiency.

[0874] The results are shown in FIG. 50. The histograms show staining for HLA Class I expression. The results indicate that several of the shRNA candidates were able to reduce expression of HLA Class I compared to control cells. In particular, shRNA-35 and shRNA-63 showed a substantial decrease exceeding 90% knockdown compared to control cells.

[0875] These results indicate the identified shRNA targeting the UTRs of the HLA-A*02:01:01:01 mRNA transcript reduce expression of HLA Class I surface protein in immune cells.

### Example 28: shRNA-Mediated Reduction of HLA-A*02 Expression Increases Blocker Receptor Availability and Restores Blocker Receptor Function in HLA-A*02 Positive Jurkat Cells

[0876] The effect of shRNA targeting the CDS of HLA-A*02:01:01:01 mRNA on the expression on blocker ligand binding receptors was determined in Jurkat cells expressing HLA-A*02. (FIG. 51).

[0877] Jurkat cells that either express HLA-A*02 (A2+ Jurkat) or do not express HLA-A*02 (A2− Jurkat) were transfected using 100 uL format Neon electroporation system (Thermo Fisher) according to manufacturer's protocol using the following settings: 3 pulses, 1500V, 10 msec. Co-transfections were performed with 2 ug plasmids encoding activator and inhibitory receptors, and 2 ug of either U6-shRNA/A*02-blocker or A*02-blocker alone per million cells. Transfected cells were recovered in RPMI media supplemented with 20% heat-inactivated FBS and 0.1% Pen/Strep.

[0878] 2 days following transfection, 10⁴ Jurkat cells were co-cultured with 1.2×10⁴ HeLa target cells and incubated in Corning® 384-well Low Flange White Flat Bottom Polystyrene TC-treated Microplates for 6 hours. ONE-Step Luciferase Assay System (BPS Bioscience) was used to evaluate Jurkat luminescence. To evaluate blocker availability to bind HLA-A*02 antigen, Jurkat cells were stained with 10 ug/mL streptavidin-PE-HLA-A*02-pMHC or streptavidin-APC-HLA-A*02-pMHC tetramer for 30 minutes at 4° C. in PBS with 1% BSA and characterized by flow cytometry (BD FACSCanto II). Histograms show all cells.

[0879] Results are shown in FIG. 51. In A2+ Jurkat effector cells in the absence of shRNA targeting the CDS of HLA-A*02:01:01:01 mRNA, activation of the CAR/TCR receptor occurred in the presence of target cells expressing the activator ligand and the HLA-A*02 blocker ligand, as well as in the presence of target cells expressing the activator ligand only. In contrast, A2− Jurkat effector cells showed significantly less CAR/TCR activation in the presence of target cells expressing the activator ligand and the HLA-A*02 blocker ligand. The A*02 blocker functions to inhibit T cell activation, which was observed in A2− Jurkat effector cells co-cultured with target cells expressing HLA-A*02 but not in A2+ Jurkat effector cells co-cultured with target cells expression HLA-A*02. This result indicates that expression of HLA-A*02 in Jurkat effector cells expressing an activator CAR/TCR and A*02 blocker interferes with A*02 inhibitory receptor function. In A2+ Jurkat effector cells transfected with shRNA targeting the CDS of HLA-A*02:01:01:01 mRNA, CAR/TCR activation was inhibited in the presence of target cells expressing the HLA-A*02 blocker ligand, but not in the presence of target cells lacking expression of the HLA-A*02 blocker ligand. This result indicates that shRNA targeting the CDS of HLA-A*02:01:01:01 mRNA can restore A*02 blocker function in the A2+ Jurkat cells.

[0880] In Jurkat cells stained with the fluorescently labeled probe that binds the A*02 blocker, FACS analysis shows the availability, or binding capacity, of the A*02 blocker receptor (inhibitory receptor). In A2− Jurkat cells, histograms from the FACS analysis shows staining of a subset of cells, indicating availability of the A*02 blocker receptor. In contrast, in A2+ Jurkat cells, there is a shift in the histogram, showing the population of cells has little to no A*02 blocker receptor availability and another ill-defined population with incomplete A*02 blocker receptor availability. However, transfection in A2+ Jurkat cells transfected with shRNA targeting the CDS of HLA-A*02:01:01:01 mRNA, the histogram is shifted and resembles the A2− population, indicating near complete availability of the A*02 blocker receptor.

[0881] Taken together, the results of these experiments show that in Jurkat cells expressing 1) a CAR or TCR that binds an activator ligand and 2) an engineered receptor that binds an HLA-A*02 blocker ligand (A*02 blocker), expression of HLA-A*02 interferes with A*02 blocker receptor function and A*02 blocker binding capacity. Further, the results show that shRNA mediated reduction of HLA-A*02 expression restores A*02 blocker function and binding capacity.

### Example 29: Selection of gNA Sequences Targeting the B2M Gene

[0882] In order to select guide nucleic acids for targeting the B2M gene, all possible gNA sequences that target a 20 nucleotide sequences in the B2M gene adjacent to an NGG protoadjacent motif (PAM) were identified, resulting in a set of 741 putative gNA sequences. This set of sequences is compatible with the Steptococcus pyogenes Cas9 nucleic acid guided endonuclease. The putative gNA sequences were mapped to the B2M gene, and 41 gNA sequences were identified that target, at least partially, the coding sequence (CDS) of the B2M gene (FIG. 52). From the CDS targeting gNA sequences, nine were selected for experimental validation (Table 9).

TABLE 9
gNA sequences targeting the CDS of the B2M gene

| Designation | SEQ ID NO |
|---|---|
| B2M-1 | 8357 |
| B2M-2 | 8358 |
| B2M-3 | 8359 |
| B2M-4 | 8360 |
| B2M-5 | 8361 |
| B2M-6 | 8362 |
| B2M-7 | 8363 |
| B2M-8 | 8364 |
| B2M-9 | 8365 |

### Example 30: gNA Sequences Targeting the B2M Gene Reduce Class I HLA Expression

[0883] gNA-mediated knockout of B2M for the nine gNA sequences in Table 9 was experimentally determined in Jurkat cells and primary T cells. Table 9 shows the nine gRNA targeting sequence candidates and their designation for the characterization experiments.

[0884] B2M CDS-targeting gRNAs were tested individually or in combination for the ability to knockout HLA-A*02 or Class I HLA polypeptides (HLA-A, HLA-B, HLA-C, and HLA-G expression) in Jurkat cells transduced with HLA-A*02 (A2+ Jurkat). The A2+ Jurkat cells were transfected with pre-complexed Cas9:sgRNA complexes from Synthego. A2+ Jurkat cells without gRNA transfection and B2M stable knockout cells severed as positive and negative controls, respectively. Four days after transfection, cells were stained for either HLA-A*02 expression or expression of Class I HLA using fluorescently labeled antibodies and subject to FACS analysis. FIG. 53 shows histograms from the FACS analyses indicating the extent of knockout mediated by an individual gRNA or combination of gRNAs. Efficacy of the gRNA targeting sequences varied, with several targeting sequences achieving up to 99% knockout of HLA-A*02 and HLA Class I expression. The targeting sequences in B2M-3, B2M-5, and B2M-6 achieved the highest percent knockout of both HLA-A*02 and HLA Class I expression in the A2+ Jurkat cells.

[0885] B2M CDS targeting gRNAs were tested individually or in combination for the ability to knockout HLA-A*02 or Class I HLA polypeptides (HLA-A, HLA-B, HLA-C, and HLA-G expression) in HLA-A*02 positive (HLA-A*02+) primary T cells. The primary T cells were transfected with pre-complexed Cas9:sgRNA from Synthego. Four days after transfections, cells were stained for either HLA-A*02 expression or expression of Class I HLA using fluorescently labeled antibodies followed by FACS analysis. FIG. 54 shows histograms from the FACS analyses indicating the extent of knockout mediated by an individual gRNA or combination of gRNAs. Efficacy of the gRNA targeting sequences varied, from little to no effect on HLA-A*02 and HLA Class I expression to achieving near complete knockout of HLA-A*02 and HLA Class I expression. The combination of targeting sequences in B2M-5 and B2M-6 gRNAs achieved near complete knockout of both HLA-A*02 and HLA Class I expression in the HLA-A*02+ primary T cells.

### Example 31: gRNA-mediated knockout of B2M increases blocker receptor availability and restores blocker receptor function in HLA-A*02 positive Jurkat cells

[0886] The effect of CRISPR/Cas9 mediated knockout of B2M on blocker ligand binding receptors was determined in Jurkat cells expressing HLA-A*02. (FIG. 55).

[0887] Jurkat cells that either express HLA-A*02 (A2+ Jurkat) or do not express HLA-A*02 (A2− Jurkat) were stably transduced with 1) a CAR or TCR that binds an activator ligand and 2) an engineered receptor that binds an HLA-A*02 blocker ligand (A*02 blocker). Cell lines were transfected with pre-complexed Cas9:sgRNA, where the sgRNAs contained a combination of the B2M-1, B2M-2, and B2M-3 targeting sequences in Table 9. Cells were co-cultured with target cells expressing the activator ligand. Target cells expressing the activator ligand either also expressed the HLA-A*02 blocker (inhibitory) ligand (A*02+) or did not express the HLA-A*02 blocker ligand (A*02−). Jurkat and target cells were co-cultured for 4 days, after which CAR/TCR activation was assessed with the Jurkat-NFAT-luciferase activation assay and blocker ligand binding capacity was assessed by FACS analysis following staining with a fluorescently labeled probe that binds the A*02 blocker.

[0888] Results are shown in FIG. 55. In A2+ Jurkat cells without B2M knockout (NO CRISPR), activation of the CAR/TCR receptor occurred in the presence of target cells expressing the activator ligand and the HLA-A*02 blocker ligand, as well as in the presence of target cells expressing the activator ligand only. In contrast, A2− Jurkat cells showed little CAR/TCR activation in the presence of target cells expressing the activator ligand and the HLA-A*02 blocker ligand. The A*02 blocker functions to inhibit T cell activation, which was observed in A2− Jurkat cells co-cultured with target cells expressing HLA-A*02 but not in A2+ Jurkat cells co-cultured with target cells expression HLA-A*02. This result indicates that expression of HLA-A*02 in Jurkat cells expressing an activator CAR/TCR and A*02 blocker interferes with A*02 blocker function. In A2+ Jurkat cells transfected with pre-complexed Cas9:sgRNAs targeting the B2M gene, CAR/TCR activation was inhibited in the presence of target cells expressing the HLA-A*02 blocker ligand, but not in the presence of target cells lacking expression of the HLA-A*02 blocker ligand. This result indicates that CRISPR/Cas9 mediated knockout of B2M can restore A*02 blocker function in the A2+ Jurkat cells.

[0889] In Jurkat cells stained with the fluorescently labeled probe that binds the A*02 blocker, FACS analysis shows the availability, or binding capacity, of the A*02 blocker receptor (inhibitory receptor). In A2− Jurkat cells, histograms from the FACS analysis shows near complete staining of the cells, indicating near complete availability of the A*02 blocker receptor. In contract, in A2+ Jurkat cells, there is a shift in the histogram, showing a population of cells with little to no A*02 blocker receptor availability and another population with incomplete A*02 blocker receptor availability. However, transfection in A2+ Jurkat cells transfected with pre-complexed Cas9:sgRNAs targeting the B2Mgene shifted the histogram to resemble the A2− population, indicating near complete availability of the A*02 blocker receptor.

[0890] Taken together, the results of these experiments show that in Jurkat cells expressing 1) a CAR or TCR that binds an activator ligand and 2) an engineered receptor that binds an HLA-A*02 blocker ligand (A*02 blocker), expression of HLA-A*02 interferes with A*02 blocker receptor function and A*02 blocker binding capacity. Further, the results show that CRISPR/Cas9 mediated knockout of B2M restores A*02 blocker function and binding capacity.

### Materials and Methods for Examples 30 and 31

### Cell Culture

[0891] Jurkat cells encoding an NFAT Luciferase reporter were maintained in RPMI media supplemented with 10% FBS, 1% Pen/Strep and 0.4 mg/mL G418/Geneticin. A2+ Jurkat were made by transducing Jurkat NFAT luciferase cells with HLA-A*02 lentivirus (custom lentivirus, Alstem) at a MOI of 5. HLA-A*02-positive cells were sorted using a FACSMelody Cell Sorter (BD).

### Jurkat Cell Transfection

[0892] Jurkat cells were transfected with Cas9:sgRNA complexes using a 100 uL format Neon electroporation system (Thermo Fisher) according to manufacturer's protocol using the following settings: 3 pulses, 1500V, 10 msec. Transfections were performed with 20 pmol Cas9 2NLS nuclease (Synthego) and 130 pmol sgRNA (Synthego) per 1 million cells which were pre-incubated for 15 minutes at room temperature prior to transfection. Transfected cells were recovered in RPMI media supplemented with 20% heat-inactivated FBS and 0.1% Pen/Strep.

### Primary T Cell Transduction and Transfection

[0893] Frozen PBMCs were thawed in 37° C. water bath and cultured at 1e6 cells/mL in LymphoONE (Takara) with 1% human serum and activated using 1:100 of T cell TransAct (Miltenyi) supplemented with IL-2 (300 IU/mL). After 24 h, if applicable, lentivirus was added to PBMCs at MOI=5. Activator and inhibitory receptor constructs were simultaneously co-transduced at a MOI=5 for each lentivirus. 24 h later, PBMCs were transfected with Cas9/sgRNA complexes using 4D-Nucleofector (Lonza) according to the manufacturer's protocol using the EO-115 program. Transfections were performed with 20 pmol Cas9 2NLS nuclease (Synthego) and 130 pmol sgRNA (Synthego) per 1 million cells which were pre-incubated for 15 minutes at room temperature prior to transfection. Transfected cells were recovered in LymphoONE (Takara) with 1% human serum and IL-2 (300 IU/ml).

### Cell Staining

[0894] For gRNA screening studies, Jurkat or primary T cells were stained 4 days after Cas9/sgRNA transfection with BB7.2 antibody (Biolegend) and/or W6/32 antibody (BD Biosciences) for 30 minutes at 4° C. to assess knockout efficiency. To evaluate inhibitor receptor availability to bind HLA-A*02 antigen, Jurkat cells were stained with 10 ug/mL streptavidin-PE-HLA-A*02-pMHC or streptavidin-APC-HLA-A*02-pMHC tetramer for 30 minutes at 4° C. in PBS with 1% BSA and characterized by flow cytometry (BD FACSCanto II).

### Jurkat-NFAT-Luciferase Activation Studies

[0895] Jurkat cell activation was determined using the ONE-Step Luciferase Assay System (BPS Bioscience) to evaluate Jurkat luminescence.

### Example 32: gRNA-Mediated Knockout of B2M Increases Blocker Receptor Availability and Restores Blocker Receptor Binding Capacity in HLA-A*02 Primary T Cells

[0896] Primary T cells were from an HLA-A*02 positive donor were transduced with CAR activator and HLA-A*02 blocker (A*02 blocker) receptors. Following transduction, the cells were sorted using immunoglobulin-binding protein L and a probe that binds the A*02 blocker. Sorting based on both protein L and the A*02 blocker was necessary to capture all T cells expressing the A*02 blocker because previous experiments showed that expression of HLA-A*02 reduced blocker binding capacity. Primary T cells expressing the CAR and A*02 blocker were transfected with B2M targeting sgRNA sequences, either B2M-3 or B2M-6. Cells were subsequently stained for HLA-A*02 expression, Class I HLA expression, or A*02 blocker probe followed by FACS analysis (FIG. 56). In HLA-A*02 positive donor cells expressing the CAR activator and A*02 blocker receptors, staining and FACS analysis prior to transfection with B2M targeting sgRNA sequences shows the cells were positive for Class I HLA and the HLA-A*02 allele, while over 85% negative for the A*02 blocker. Transfection with B2M targeting sgRNA resulted in efficient knockout of Class I HLA (98.8% and 87.1% for B2M-3 and B2M-6, respectively) and the HLA-A*02 (99.0% and 86.3% for B2M-3 and B2M-6, respectively). In the cell populations with sgRNA mediated knockout of B2M, the A*02 blocker staining increased from 14.8% of the cell population to 40.7% and 44.0% for B2M-3 and B2M-6, respectively. These results corroborate the observation in Example 3 that CRISPR/Cas9 mediated knockout of B2M in HLA-A*02 positive T cells expressing CAR activator and A*02 blocker receptors increases binding capacity of the A*02 blocker. These results suggest that endogenous expression of HLA-A*02 interferes with the HLA-A*02− specific blocker receptor ligand binding capacity, and that knockout of endogenous B2M expression reverses the effect. Thus, gRNA-mediated knockout of endogenous B2M in immune cells expressing an HLA-A*02-specific blocker receptor can reduce autocrine interference or activation of the blocker receptor.

### Example 33: Design of gRNA Sequences Targeting the B2M Promoter

[0897] Inactivating expression of the B2M gene by targeting the B2M promoter with gRNA sequences can potentially reduce expression of Class I HLA complexes. In order to identify B2M promoter sequences for targeting with gRNAs, 500 bp truncations of the sequence upstream of the B2M gene were carried out in Jurkat cells and the effect on expression of Class I HLA complexes was determined by staining cells for Class I HLA expression followed by FACS analysis. The analysis shows that the minimum region sufficient for expression of Class I HLA is the 500 bp region upstream of the sequence encoding the signal peptide. This region may be considered the minimum promoter for the B2M gene and is a putative candidate region for gRNA targeting with gRNAs (FIG. 57). A set of gRNA sequences targeting the region 500 bp region upstream of the sequence encoding the B2M signal peptide was developed. The total of 73 gRNA sequences were designed to be complementary to a 20 nt sequence adjacent to a Cas9 compatible PAM (NGG) in the 500 bp region (FIG. 58). A subset of 46 gRNA sequences target the predicted region predicted to be the B2M promoter identified by the UCSC Genome Browser (Lee et al. Nucleic Acids Research. 48:D756-D761 (2020)). These gRNA sequences are characterized using methods as described in Examples 2-4 for validating their ability to reduce expression of Class I HLA complexes (FIG. 59). The promoter targeting gRNA sequences showed little efficacy in reducing Class I HLA expression.

### Example 34: Selection of Interfering RNA Sequences Targeting the B2M Gene

[0898] In order to select guide nucleic acids for targeting the B2M gene, all possible 18 bp, 19 bp, 20 bp, 21 bp, and 22 bp transcribed sequences corresponding to B2M mRNA were determined, yielding 4620 sequences. From this set of putative target sequences, those containing GC content less than 25% or greater than or equal to 60% were excluded, resulting in 3596 potential target sequences. From this set of potential target sequences, those with runs of 4 or more of the same base in a row or a run of 7 C or G bases in a row were removed, resulting in 3000 potential target sequences. The set was further reduced by removing all potential sequence that were not 21 bp long, resulting in 582 potential target sequences. Next, the sequences were analyzed by identifying favorable characteristics identified by computational tools, such as the GPP RNAi Designer (Broad Institute), and similar favorable characteristics. The final set of potential targets included 282 sequences that can be used to design interfering RNAs that target the B2M mRNA transcript for degradation through RNA interference. Illustrative alignments between shRNAs with a complementary sequence to the identified targets of the analysis are shown in FIG. 60.

### Example 35: shRNA-Mediated Reduction of B2M Expression Reduces Class I HLA Expression

[0899] The effect of shRNA mediated reduction of B2M expression on Class I HLA expression was assessed.

[0900] Jurkat cells expressing HLA-A*02 were transfected using 100 uL format Neon electroporation system (Thermo Fisher) according to manufacturer's protocol using the following settings: 3 pulses, 1500V, 10 msec. Co-transfections were performed with 300 ng of U6-shRNA plasmids and 1.2 ug of plasmid expressing EGFR as a transfection marker per 1 million cells. Transfected cells were recovered in RPMI media supplemented with 20% heat-inactivated FBS and 0.1% Pen/Strep.

[0901] 4 days following transfection, cells were stained for HLA-A*02 expression with BB7.2 antibody (Biolegend) and/or HLA Class I expression W6/32 antibody (BD Biosciences) and anti-EGFR antibody (Biolegend) for 30 minutes at 4° C. to assess knockdown efficiency.

[0902] The results are shown in FIG. 61. The histograms show staining for either HLA-A*02 or HLA Class I, and corresponding quantification as % expression in control cells. The results indicate that several of the shRNA candidates were able to reduce expression of HLA-A*02 and HLA Class I. In particular, shRNA-03, shRNA-04, shRNA-54, and shRNA-89 showed greater than 50% decrease compared to control cells.

[0903] These results indicate shRNA mediated reduced expression of B2M results in reduced expression of HLA-A*02 and HLA Class I molecules in immune cells.

### Example 36: shRNA-Mediated Reduction of B2M Expression Increases Blocker Receptor Availability and Restores Blocker Receptor Function in HLA-A*02 Positive Jurkat Cells

[0904] The effect of shRNA mediated reduction of B2M expression on blocker ligand binding receptors was determined in Jurkat cells expressing HLA-A*02. (FIG. 62).

[0905] A2− and A2+ transduced Jurkat cells were transfected using 100 uL format Neon electroporation system (Thermo Fisher) according to manufacturer's protocol using the following settings: 3 pulses, 1500V, 10 msec. Co-transfections were performed with 2 ug CAR plasmids and 2 ug of either U6-shRNA/A*02-blocker or A*02-blocker alone per million cells. Transfected cells were recovered in RPMI media supplemented with 20% heat-inactivated FBS and 0.1% Pen/Strep.

[0906] Jurkat cells that either express HLA-A*02 (A2+ Jurkat) or do not express HLA-A*02 (A2− Jurkat) were transfected using 100 uL format Neon electroporation system (Thermo Fisher) according to manufacturer's protocol using the following settings: 3 pulses, 1500V, 10 msec. Co-transfections were performed with 2 ug plasmids encoding activator and inhibitory receptors, and 2 ug of either U6-shRNA/A*02-blocker or A*02-blocker alone per million cells. Transfected cells were recovered RPMI media supplemented with 20% heat-inactivated FBS and 0.1% Pen/Strep.

[0907] 2 days following transfection, 10⁴ Jurkat cells were co-cultured with 1.2×10⁴ HeLa target cells and incubated in Corning® 384-well Low Flange White Flat Bottom Polystyrene TC-treated Microplates for 6 hours. ONE-Step Luciferase Assay System (BPS Bioscience) was used to evaluate Jurkat luminescence. To evaluate blocker availability to bind HLA-A*02 antigen, Jurkat cells were stained with 10 ug/mL streptavidin-PE-HLA-A*02-pMHC or streptavidin-APC-HLA-A*02-pMHC tetramer for 30 minutes at 4° C. in PBS with 1% BSA and characterized by flow cytometry (BD FACSCanto II). Histograms show all cells.

[0908] Results are shown in FIG. 62. In A2+ Jurkat effector cells in the absence of shRNA targeting B2M, activation of the CAR/TCR receptor occurred in the presence of target cells expressing the activator ligand and the HLA-A*02 blocker ligand, as well as in the presence of target cells expressing the activator ligand only. In contrast, A2− Jurkat effector cells showed significantly less CAR/TCR activation in the presence of target cells expressing the activator ligand and the HLA-A*02 blocker ligand. The A*02 blocker functions to inhibit T cell activation, which was observed in A2− Jurkat effector cells co-cultured with target cells expressing HLA-A*02 but not in A2+ Jurkat effector cells co-cultured with target cells expression HLA-A*02. This result indicates that expression of HLA-A*02 in Jurkat effector cells expressing an activator CAR/TCR and A*02 blocker interferes with A*02 inhibitory receptor function. In A2+ Jurkat effector cells transfected with shRNA targeting the B2M expression, CAR/TCR activation was inhibited in the presence of target cells expressing the HLA-A*02 blocker ligand, but not in the presence of target cells lacking expression of the HLA-A*02 blocker ligand. This result indicates that shRNA mediated reduction of B2M expression can restore A*02 blocker function in the A2+ Jurkat cells.

[0909] In Jurkat cells stained with the fluorescently labeled probe that binds the A*02 blocker, FACS analysis shows the availability, or binding capacity, of the A*02 blocker receptor (inhibitory receptor). In A2− Jurkat cells, histograms from the FACS analysis shows staining of a subset of cells, indicating availability of the A*02 blocker receptor. In contrast, in A2+ Jurkat cells, there is a shift in the histogram, showing the population of cells has little to no A*02 blocker receptor availability and another ill-defined population with incomplete A*02 blocker receptor availability. However, transfection in A2+ Jurkat cells with shRNA targeting the B2M expression shifted the histogram to resemble the A2− population, indicating near complete availability of the A*02 blocker receptor.

[0910] Taken together, the results of these experiments show that in Jurkat cells expressing 1) a CAR or TCR that binds an activator ligand and 2) an engineered receptor that binds an HLA-A*02 blocker ligand (A*02 blocker), expression of HLA-A*02 interferes with A*02 blocker receptor function and A*02 blocker binding capacity. Further, the results show that shRNA mediated reduction of B2M expression restores A*02 blocker function and binding capacity.

### Example 37: Expression of a Blocker Receptor by T Cells Blocks Killing Mediated by TCR Receptors on the T Cells

[0911] The ability of the blocker receptor, when expressed by T cells, to block killing mediated by T cell TCR expression was assayed using primary T cells and the NY-ESO-1 and KRAS TCRs.

[0912] Primary T cells were transduced with a vector encoding an NY-ESO-1 or KRAS TCR receptor as a control, or co-transduced with either the NY-ESO-1 or KRAS TCR receptor in combination with an HLA-A*02 LIR1 inhibitory (blocker) receptor. Expression of the TCR and the blocker receptor were confirmed by flow cytometry (FIG. 65A, NY-ESO-1 TCR alone shown at left, NY-ESO-1 TCR and the blocker pair shown on the right; equivalent KRAS TCR and KRAS and blocker pair are not shown). T cells expressing the TCR only or the TCR the blocker receptor in combination were co-cultured with target cells as indicated in FIGS. 65B and 65C. In FIG. 65B, A375 target cells, which are NY-ESO+/HLA-A2+, were used as target cells for effector cells expressing the NY-ESO-1 TCR, or the NY-ESO-1 TCR and blocker receptor pair. As shown in FIG. 65B, significant killing was observed at 9:1 and 3:1 E:T ratio with the NY-ESO-1 TCR alone, but not when the T cells expressed both the NY-ESO-1 TCR and the HLA-A*02 LIR1 blocker receptor.

[0913] To assay the effect of the blocker receptor on effector cells expressing the KRAS TCR, HuCTT1 target cells expressing the KRAS-G12D peptide and HLA-A*11 (KRAS-G12D/A11 or KRAS G12D/A11, referred to in FIG. 65C as Target A) were co-cultured with effector T cells expressing the KRAS TCR, or T cells expressing both the KRAS TCR and the HLA-A*02 LIR1 blocker receptor. HuCTT1 target cells that did, and did not, co-express HLA-A*02 (referred to as target B in FIG. 65C), were also used in this assay. As shown in FIG. 65C, the KRAS TCR showed significant cytotoxicity on both target cell types, those expressing both target A and both targets A and B (target AB). KRAS TCR and HLA-A*02 LIR1 blocker receptor expressing T cells only showed killing of KRAS-G12D/A11 (activator antigen) expressing cells, and did not show killing of KRAS-G12D/A11 and A2 (activator antigen and blocker antigen) expressing target cells.

[0914] In summary, the blocker receptor silences an extremely potent TCR directed at NY-ESO-1 which has a sensitivity of ˜10 molecules/cell. Blocker receptor activity was not limited to HLA-A*02-restricted TCRs. As shown in FIG. 65C, the HLA-A*02 LIR1 blocker receptor was also able to silence an HLA-A*11-restricted KRAS-target TCR.

[0915] The blocker receptor is capable of controlling the graft versus host allogeneic response similarly to what is seen in T cells in which TRAC has been knocked out.

[0916] Untransduced T cells, T cells transduced with HLA-A*02 LIR1 blocker receptor, or in which TRAC (also known as TRCA) had been knocked out using CRISPR/Cas9 to induce indels in the TRAC locus, were co-cultured with HLA-A*02+ HeLa target cells to determine the cytotoxicity caused by allogeneic reactivity. T cells were purified from two donors (donors 1 and 2 in FIG. 66). Allogeneic reactivity was triggered by multiple rounds of exposure to HeLa target cells at a 3:1 effector to target ratio, in the presence of 100 IU/mL of IL-2. In round 3 for donor 1, and in round 2 for donor 2, allogeneic reactivity can be seen in the untransduced TRAC+ control cells (UTD), but was blocked to a similar degree by T cells expressing the blocker receptor, or in which TRAC had been knocked out.

[0917] The blocker receptor is also able to minimize allogeneic response in mixed lymphocyte reactions. T cells were isolated from the peripheral blood mononuclear cells (PMBC) of two donors. The TRAC locus was knocked out in a portion of these T cells using CRISPR/Cas9 (“Allo no TCR” cells in FIG. 67A), and HLA-A*02 LIR1 blocker receptor was expressed in another portion of the isolated T cells (Allo+Blocker in FIG. 67A). T cells alone, with blocker receptor expression, or with TRAC KO from donor 1 were loaded with CMFDA dye and co-cultured with T-cell depleted PBMCs from donor 2 (Allo, Allo+Blocker, Allo no TCR, respectively in FIG. 67A). T cells alone from donor 1 were also co-cultured with T-cell depleted PBMCs from donor 1 (Autologous in FIG. 67A). Proliferation of T cells from donor 1 was measured by monitoring the decreasing of intensity of CMFDA dye, which is diluted as the cells divide, upper series of panels in FIG. 67A. T cell activation was monitored by CD25 expression, as seen in the lower panels in FIG. 67A. Cytokine (interferon gamma, IFN-g or IFNG) secretion was also measured in T cell only wells and co-cultured wells (FIG. 67B). T cells from donor 1 co-cultured with PBMC from donor 2 triggered T cell proliferation, activation and cytokine secretion. These activities were reduced in T cells with TRAC knock out, or which expressed the blocker receptor. The reduction was similar to the level seen in autologous co-culture (FIGS. 67A-67B).

[0918] Similar results were seen when the primary T cells were also transduced with an EGFR chimeric antigen receptor (FIGS. 68A-68B). T cells were isolated from PMBC from two donors. Untransduced T cells (UTD), T cells expressing EGFR CAR alone, or EGFR CAR in combination with a blocker receptor, each from donor 1, were loaded with CMFDA dye and co-cultured with T-cell depleted PBMCs from donor 2 (UTD, EGFR CAR, EGFR+Blocker, respectively in FIG. 68A). Un transduced T cells (UTD) from donor 1 was also co-cultured with T-cell depleted PBMCs from donor 1 (Non-Allo in FIG. 68A). Proliferation of T cells from donor 1 was measured by monitoring decreasing of intensity of CMFDA (FIG. 68A, top row), and T cell activation was monitored by CD25 expression (FIG. 68A, bottom row). Cytokine (IFN-g) secretion was also measured in T cell only wells and co-cultured wells. Untransduced T cells, and EGFR CAR expressing T cells from donor 1 co-cultured with PBMC from donor 2 triggered T cell proliferation, activation and cytokine secretion. These activities were reduced in T cells expressing both the EGFR CAR and the blocker receptor, and the reduction was similar to the level similar to the “non-allo”, i.e. autologous, co-culture.

### Example 38: Mouse Model of Effect of Blocker Receptor on Allogeneic Transplanted Cells

[0919] FIG. 69 is an experimental scheme for testing graft versus host and host versus graft allogeneic effects of T cells expressing both an activator and a blocker receptor in a mouse model. Allogeneic mouse T cells to be administered to a mouse (i.e., graft T cells) expressing the activator receptor, for example an EGFR CAR, or an activator receptor in combination with a blocker receptor, will undergo three rounds of co-culture in vitro with host PBMCs from a different mouse which have been depleted of T and NK cells. The effect of co-culture with host PBMCs on T cell proliferation, and optionally activation and cytokine secretion will be assayed as described in Example 37. In addition, NSG immunodeficient mice will be injected with (1) host (i.e., their own) PBMCs that have been T and NK cell depleted; (2) a combination of graft T cells (from a different mouse) that have been transduced with the CAR and the host PBMCs that have been T and NK cell depleted; or (3) a combination of graft T cells that have been transduced with the CAR and the blocker receptor, and the host PBMCs that have been T and NK cell depleted. It is expected that in the mice injected with (1) host PBMCs, cell numbers of host PBMCs should remain steady during the testing period. It is expected that in mice injected with (2) graft T cells expressing the CAR and host PBMCs, that the graft T cells expressing the CAR will kill host PBMCs and reduce their number. It is also expected that mice injected with (3) graft T cells expressing the CAR and the blocker, and host PBMCs, that the blocker receptor will protect the host PBMCs and their number should remain steady.

### Example 39: Knock-Out of B2M

[0920] Multiple methods can be used to mitigate host versus graft effects, including knock out of B2M using CRISPR/Cas9, or by incorporation of an interfering RNA such as an shRNA targeting B2M into a lentiviral vector, such as a lentiviral vector encoding the blocker and/or activator receptors. CRISPR/Cas9 knock out of B2M can be accomplished by delivery of the CRISPR/Cas9 ribonucleoprotein (RNP) targeting the B2M locus through transfection into T cells, or by encoding the CRISPR/Cas9 and gRNA components of the RNP using a lentiviral vector. Combinations of delivery methods can also be used. For example, the gRNA can be incorporated into a lentiviral vector, while the Cas9 protein (or a sequence encoding the Cas9 protein) is delivered by transfection.

[0921] FIG. 70A shows one method for generating B2M(−) T cells, i.e. T cells in which the B2M locus has been knocked out by creation of a deletion caused by using CRISPR/Cas9 and one or more gRNAs specific to B2M that induces a double strand break in the locus. In this method, T cells are transduced with a lentiviral vector encoding the blocker and activator receptor under control of single promoter. The coding sequences of the two receptors are separated by a T2A self cleaving polypeptide. After transduction, the T cells are electroporated with Cas9 RNP with gRNAs that target B2M, resulting in B2M knockout. B2M knockout eliminates the expression of HLA class I MHC complexes from the T cell surface.

[0922] FIG. 70B shows pan-HLA expression in T cells from 8 donors in which the T cells had been transduced with the lentiviral vector shown in FIG. 70B, with and without B2M knockout. As can be seen in FIG. 70B, B2M knockout reduced HLA expression in all 8 donors.

[0923] B2M knockout in T cells expressing the activator and blocker receptor pair produces T cells that are protected from T cell killing, and limited susceptibility to NK cell mediated killing. NK effector cells, which are CD3(−) CD56(+), from the donor 1 (host) were sorted using the CD3ξ and CD56 markers and FACS as shown in FIG. 71, upper left. These NK effector cells were co-cultured with T cells with or without B2M knockout from donor 2 (graft) (FIG. 71, bottom, middle and right panels). K562 cells were also co-cultured with the NK cells as positive control (FIG. 71, bottom row, left panel). T cells without B2M knockout showed minimal killing by NK cells at up to an 8:1 NK:T ratio. T cells with B2M knockout were killed by NK cells at >4:1 NK:T cell ratio. Even though this ratio may not be physiologically relevant, NK cell killing can be minimized through optimization. Co-culture was carried out in LymphoOne medium, for 48 hours, with no IL-2.

[0924] FIG. 72 shows another method for generating B2M(−) T cells expressing the activator and blocker receptor pair. In this method, B2M is again knocked out by CRISPR/Cas9. However, the gRNA and two receptors are encoded by a lentiviral vector such as the one shown, and the Cas9 protein is delivered by electroporation. One advantage of this method is that because the gRNA and the two receptors are delivered by the same lentiviral vector, HLA expression is linked to expression of both receptors. Purification/enrichment for cells expressing the two receptors can be done by HLA(+) cell depletion.

[0925] FIG. 73A shows method for generating B2M(−) T cells expressing the activator and blocker receptor pair using an interfering RNA, such as a short hairpin RNA (shRNA) specific to a B2M sequence to knock down B2M expression. In this method, the B2M shRNA and two receptors are encoded in a lentiviral vector. One advantage is that the reduction of HLA expression is again linked to expression of the activator and blocker receptor pair. Purification/enrichment for cells expressing the two receptors can be done by HLA(+) cell depletion.

[0926] FIG. 73B shows pan-HLA expression in T cells from 4 donors that have been transduced with a lentiviral vector encoding an activator and blocker receptor pair, or a lentiviral vector encoding an activator and blocker receptor pair and a B2M shRNA. As can be seen from FIG. 73B, transduction with a vector including the B2M shRNA reduced HLA expression in T cells from all four donors.

### Example 40: Effect of B2M Knock-out or Knock Down on NK and T Cell Killing by Host Cells

[0927] The effect that knocking out or knocking down B2M in graft T cells has on killing mediated by host NK and T cells was assayed used the experiment depicted in FIG. 74. B2M was knocked out, or knocked down, in graft T cells from a first donor (donor 1), as described in Example 39. The donor 1 T cells also expressed the activator and blocker receptors. CD3-CD56+NK cells from a second donor (host, or donor 2) were purified from PBMCs using FACS. The T cells from donor 1 were then mixed with the NK cells from donor 2 at a ratio of 1:1 host to graft cells and co-cultured under appropriate culture conditions, in LymphoOne medium, for 5 days, with no IL-2. The graft T cells from donor 1 were also mixed with the NK cells from donor 2 and co-cultured under similar conditions. On day 5, if the graft cells were killed, the E:T ratio on day 5 should increase to be greater than 1. If no killing of graft cells occurred, then the E:T ratio should be less than or equal to 1.

[0928] The results are shown in FIG. 75. T cells expressing the activator and blocker receptors, the activator and blocker receptors with a B2M shRNA, or the activator and blocker receptors with CRISPR/Cas9 mediated B2M knockdown from one donor (D1, graft) were co-cultured with T cells or NK cells from another donor (D2, host) at a host to graft ratio of 1:1 for 5 days, without IL-2. As seen in FIG. 75, donor T cells expressing both receptors, which were HLA(+), were killed by host T cells due to HLA mismatch. These donor T cells were not killed by NK cells. Donor T cells expressing the B2M shRNA, which had very low HLA, were not killed by host T cells as there was very low HLA mismatch. Nor were these cells killed by NK cells, as there was still enough HLA to prevent this from happening without cytokine. However, T cells in which B2M had been knocked out were also killed by host T cells and NK cells.

### Example 41: HLA-A Knock-Out Using CRISPR/Cas9 in Primary T Cells

[0929] Primary T cells were isolated from PBMCs from three donors, one who was HLA-A*02+ and two who were HLA-A*02−, and transduced with an activator CAR, or an activator CAR in combination with an HLA-A*02 LIR1 inhibitory receptor, as described above. Transduced T cells were than transfected with gRNAs to HLA-A*02 or B2M, a scrambled gRNA as a control, and Cas9 protein. Untransduced control cells were also transfected with the gRNAs to HLA-A*02, B2M, or the scrambled gRNA and the Cas9. Transfected T cells then stained for HLA expression using an HLA-A*02 specific primary antibody (REA142, from Miltenyi Biotec), or a pan-HLA primary antibody (W6/32), and the expression levels were assayed using fluorescence activated cell sorting. The results are shown in FIG. 76. As shown in FIG. 76, when HLA-A*02 cell surface expression was assayed (top row, left 3 panels) HLA-A*02 levels were reduced by all HLA-A*02 gRNAs to a level comparable to that seen with two B2M gRNAs. When HLA expression was assayed with a pan-HLA antibody (FIG. 76, bottom row, left 3 panels), HLA gRNA-16 was able to reduce HLA surface expression in the HLA-A*02+ donor to a level comparable to that seen with the two B2M gRNAs. HLA gRNAs-13 and -008 did not achieve a similar reduction in total HLA, presumably due to the expression of the non-HLA-A*02 alleles by the HLA-A*02− donors. This result is an accordance with in silico specificity predicted for HLA gRNAs shown in the heat map in FIG. 76 at right (level of gray shading indicates predicted cutting at the indicated locus).

[0930] Primary T cells transduced with an activator CAR and/or HLA-A*02 LIR1 blocker receptor, and with HLA-A*02 knocked out using HLA gRNA-16, were assayed for their ability to selectively kill HeLa target cells. Transduced and transfected T cells were co-cultured for 16 days with HeLa cells expressing the CAR activator target (FIG. 77, referred to as [A]), or with HeLa cells expressing both the CAR activator target and HLA-A*02, the blocker receptor target ([AB] HeLa cells in FIG. 77). As shown in FIG. 77, primary T cells from an HLA-A*02+ donor which expressed the activator and blocker receptors, and which had HLA-A*02 knocked out using HLA gRNA-16, were able to selectively kill HeLa cells expressing the activator target, but not HeLa cells expressing both the activator and blocker targets. In equivalent primary T cells from HLA-A*02 negative donors, transfection with HLA gRNA-16 did not negatively affect selective killing of HeLa cells expressing the activator, but not the activator and blocker, targets.

[0931] FIG. 78 shows that knocking out B2M or HLA-A*02 in T cells from an HLA-A*02+ donor restores HLA/peptide tetramer binding to the T cells (see FIG. 44B for a schematic). Cis-binding of cell surface HLA-A*02 to the HLA-A*02 blocker receptor. As can be seen in FIG. 78, when primary T cells from an HLA-A*02+ donor were probed with a labeled HLA-A*02 incorporated into HLA tetramer, labeling of the T cells through binding of the tetramer to the blocker receptor was inhibited, presumably by endogenous HLA-A*02 interacting with the blocker receptor. Upon knockdown of HLA or B2M with CRISPR/Cas9 and the indicated gRNA, labeling of T cells by labeled tetramer was restored, and equivalent to that seen with T cells from HLA-A*02− donors (FIG. 77).

### REPRESENTATIVE EMBODIMENTS

### Representative Embodiments, Set 1

[0932] 1. An allogeneic immune cell comprising:
a. a first engineered receptor, the first engineered receptor comprising a transmembrane region and an extracellular region, the extracellular region comprising a first ligand binding domain capable of specifically binding a first ligand; and
b. a second engineered receptor, the second engineered receptor comprising a transmembrane region and an extracellular region, the extracellular region comprising a second ligand binding domain capable of specifically binding a second ligand, wherein binding of the first ligand binding domain to the first ligand activates or promotes activation of the immune cell by the first receptor, and wherein binding of the second ligand binding domain to the second ligand inhibits activation of the immune cell by the first receptor.
2. The allogeneic immune cell of embodiment 1, comprising a first modification that reduces or eliminates expression or function of a component of the major histocompatibility class I complex (MHC I).
3. The allogeneic immune cell of embodiment 2, wherein the component of MHC I is HLA-A, HLA-B, HLA-C or B2M.
4. The allogeneic immune cell of embodiment 2 or 3, wherein the first modification comprises a genetic modification of a HLA-A, HLA-B, HLA-C or B2M locus of the allogeneic immune cell genome.
5. The allogeneic immune cell of embodiment 3 or 4, wherein the first modification comprises a deletion, insertion, substitution or frameshift mutation in the HLA-A, HLA-B, HLA-C or B2M locus.
6. The allogeneic immune cell of embodiment 3-5, wherein the first modification reduces expression of a protein encoded by the HLA-A, HLA-B, HLA-C or B2M locus.
7. The allogeneic immune cell of embodiment 2-5, wherein the first modification eliminates expression of a functional protein encoded by the HLA-A, HLA-B, HLA-C or B2M locus.
8. The allogeneic immune cell of embodiment of any one of embodiments 2-7, wherein the first modification comprises using a nucleic acid guided endonuclease, a zinc finger nuclease or a TALEN.
9. The allogeneic immune cell of embodiment 8, wherein the nucleic acid guided endonuclease is selected from the group consisting of Cas1, Cas1B, Cas2, Cas3, Cas4, Cas5, Cas6, Cas7, Cas8, Cas9, Cas10, Csy1, Csy2, Csy3, Cse1, Cse2, Csc1, Csc2, Csa5, Csn2, Csm2, Csm3, Csm4, Csm5, Csm6, Cmr1, Cmr3, Cmr4, Cmr5, Cmr6, Csb1, Csb2, Csb3, Csx17, Csx14, Csx10, Csx16, CsaX, CasY, Csx3, Csx1, Csx15, Csf1, Csf2, Csf3, and Csf4.
10. The allogeneic immune cell of embodiment 8, wherein the nucleic acid guided endonuclease is Cas9.
11. The allogeneic immune cell of any one of embodiments 8-10, wherein the allogeneic immune cell is modified with a nucleic acid guided endonuclease in a complex with a guide nucleic acid (gNA) that specifically targets a sequence of the HLA-A, HLA-B, HLA-C or B2M locus.
12. The allogeneic immune cell of embodiment 2 or 3, wherein the first modification comprises expression of an interfering RNA.
13. The allogeneic immune cell of embodiment 12, wherein the interfering RNA is a small interfering RNA (siRNA), a short hairpin RNA (shRNA) or a microRNA.
14. The allogeneic immune cell of embodiment 12 or 13, wherein the interfering RNA comprises a sequence complementary to a target sequence of HLA-A, HLA-B, HLA-C or B2M.
15. The allogeneic immune cell of embodiment 14, wherein the target sequence of HLA-A, HLA-B, HLA-C or B2M is between 18 and 27 bp in length.
16. The allogeneic immune cell of any one of embodiments 12-15, wherein first modification reduces host versus graft disease when a plurality of the allogeneic immune cells are administered to a subject.
17. The allogeneic immune cell of any one of embodiments 1-16, comprising a second modification that reduces or eliminates expression or function of CD52.
18. The allogeneic immune cell of embodiment 17, wherein the second modification comprises a deletion, insertion, substitution or frameshift mutation in the CD52 locus of the allogeneic immune cell genome.
19. The allogeneic immune cell of embodiment of embodiment 17 or 18, wherein the second modification comprises using a nucleic acid guided endonuclease, a zinc finger nuclease or a TALEN.
20. The allogeneic immune cell of embodiment 19, wherein the nucleic acid guided endonuclease is selected from the group consisting of Cas1, Cas1B, Cas2, Cas3, Cas4, Cas5, Cas6, Cas7, Cas8, Cas9, Cas10, Csy1, Csy2, Csy3, Cse1, Cse2, Csc1, Csc2, Csa5, Csn2, Csm2, Csm3, Csm4, Csm5, Csm6, Cmr1, Cmr3, Cmr4, Cmr5, Cmr6, Csb1, Csb2, Csb3, Csx17, Csx14, Csx10, Csx16, CsaX, CasY, Csx3, Csx1, Csx15, Csf1, Csf2, Csf3, and Csf4.
21. The allogeneic immune cell of embodiment 19, wherein the nucleic acid endonuclease is Cas9.
22. The allogeneic immune cell of any one of embodiments 19-21, wherein the allogeneic immune cell is modified with a nucleic acid guided endonuclease in a complex with a guide nucleic acid (gNA) that specifically targets a sequence of the CD52 locus.
23. The allogeneic immune cell of embodiment 17, wherein the second modification comprises expression of an interfering RNA.
24. The allogeneic immune cell of embodiment 23, wherein the interfering RNA is a small interfering RNA (siRNA), a short hairpin RNA (shRNA) or a microRNA.
25. The allogeneic immune cell of embodiment 23 or 24, wherein the interfering RNA comprises a sequence complementary to a target sequence of CD52.
26. The allogeneic immune cell of embodiment 25, wherein the target sequence of CD52 is between 18 and 27 bp in length.
27. The allogeneic immune cell of any one of embodiments 1-26, comprising a third modification that reduces targeting of the allogeneic immune cell by NK cells of a subject.
28. The allogeneic immune cell of embodiment 27, wherein the third modification comprises overexpression of HLA-E, HLA-G or NKG2A.
29. The allogeneic immune cell of any one of embodiments 1-28, wherein the allogeneic immune cell comprises an endogenous TCR.
30. The allogeneic immune cell of embodiment 29, wherein expression of the second engineered receptor reduces function of the endogenous TCR.
31. The allogeneic immune cell of embodiment 29 or 30, wherein expression of the second engineered receptor reduces graft versus host disease when a plurality of the allogeneic immune cells are administered to a subject.
32. The allogeneic immune cell of any one of embodiments 1-28, wherein the allogeneic immune cell comprises a fourth modification that reduces or eliminates expression or function of an endogenous TCR.
33. The allogeneic immune cell of embodiment 32, wherein the fourth modification comprises a modification of a TRCA, TRB, CD3D, CD3E, CD3G or CD3Z locus of the allogeneic immune cell.
34. The allogeneic immune cell of embodiment 32 or 33, wherein the fourth modification comprises a deletion, insertion, substitution or frameshift mutation in TRCA, TRB, CD3D, CD3E, CD3G or CD3Z.
35. The allogeneic immune cell of embodiment 34, wherein the fourth modification reduces expression of a protein encoded by the TRCA, TRB, CD3D, CD3ε, CD3G or CD3Z locus.
36. The allogeneic immune cell of embodiment 34, wherein the fourth modification eliminates expression of a functional protein encoded by the TRCA, TRB, CD3D, CD3ε, CD3G or CD3Z locus.
37. The allogeneic immune cell of any one of embodiments 32-36, wherein the fourth modification comprises using a nucleic acid guided endonuclease, a zinc finger nuclease or a TALEN.
38. The allogeneic immune cell of embodiment 37, wherein the nucleic acid guided endonuclease is selected from the group consisting of Cas1, Cas1B, Cas2, Cas3, Cas4, Cas5, Cas6, Cas7, Cas8, Cas9, Cas10, Csy1, Csy2, Csy3, Cse1, Cse2, Csc1, Csc2, Csa5, Csn2, Csm2, Csm3, Csm4, Csm5, Csm6, Cmr1, Cmr3, Cmr4, Cmr5, Cmr6, Csb1, Csb2, Csb3, Csx17, Csx14, Csx10, Csx16, CsaX, CasY, Csx3, Csx1, Csx15, Csf1, Csf2, Csf3, and Csf4.
39. The allogeneic immune cell of embodiment 37, wherein the nucleic acid guided endonuclease is Cas9.
40. The allogeneic immune cell of any one of embodiments 37-39, wherein the allogeneic immune cell is modified with a nucleic acid guided endonuclease in a complex with a guide nucleic acid (gNA) that specifically targets a sequence of the TRCA, TRB, CD3D, CD3E, CD3G or CD3Z locus.
41. The allogeneic immune cell of embodiment 40, wherein the fourth modification comprises expression of an interfering RNA.
42. The allogeneic immune cell of embodiment 41, wherein the interfering RNA is a small interfering RNA (siRNA), a short hairpin RNA (shRNA) or a microRNA.
43. The allogeneic immune cell of embodiment 41 or 42, wherein the interfering RNA comprises a sequence complementary to a target sequence of TRCA, TRB, CD3D, CD3E, CD3G or CD3Z.
44. The allogeneic immune cell of embodiment 43, wherein the target sequence of TRCA, TRB, CD3D, CD3E, CD3G or CD3Z is between 15 and 30 bp in length.
45. The allogeneic immune cell of any one of embodiments 32-44, wherein the fourth modification reduces graft versus host disease when a plurality of the allogeneic immune cells are administered to a subject.
46. The allogeneic immune cell of any one of embodiments 1-45, wherein the second ligand not expressed in a target cell due to loss of heterozygosity of a gene encoding the second ligand.
47. The allogeneic immune cell of any one of embodiments 1-46, wherein the second ligand is an HLA class I allele or a minor histocompatibility antigen (MiHA).
48. The allogeneic immune cell of any one of embodiments 1-46, wherein the second ligand is not expressed in the target cell due to loss of Y chromosome.
49. The allogeneic immune cell of embodiment 47, wherein the MiHA is selected from the group of MiHAs in Tables 2 and 3.
50. The allogeneic immune cell of embodiment 47, wherein the MiHA is HA-1.
51. The allogeneic immune cell of embodiment 47, wherein the HLA class I allele comprises HLA-A, HLA-B or HLA-C.
52. The allogeneic immune cell of embodiment 51, wherein the HLA class I allele is an HLA-A*02 allele.
53. The allogeneic immune cell of embodiment 48, wherein the second ligand is encoded by a Y chromosome gene.
54. The allogeneic immune cell of any one of embodiments 1-50, wherein the first ligand and second ligand are not the same.
55. The allogeneic immune cell of any one of embodiments 1-54, wherein the first ligand is expressed by target cells.
56. The allogeneic immune cell of any one of embodiments 1-55, wherein the first ligand is expressed by target cells and a plurality of non-target cells.
57. The allogeneic immune cell of embodiment 56, wherein the plurality of non-target cells express both the first and second ligands.
58. The allogeneic immune cell of any one of embodiments 1-57, wherein the second ligand is not expressed by the target cells, and is expressed by the plurality of non-target cells.
59. The allogeneic immune cell of any one of embodiments 56-58, wherein the target cells are cancer cells and the non-target cells are non-cancerous cells.
60. The allogeneic immune cell of any one of embodiments 1-59, wherein the first ligand is selected from the group consisting of a cell adhesion molecule, a cell-cell signaling molecule, an extracellular domain, a molecule involved in chemotaxis, a glycoprotein, a G protein-coupled receptor, a transmembrane protein, a receptor for a neurotransmitter and a voltage gated ion channel, or a peptide antigen thereof.
61. The allogeneic immune cell of any one of embodiments 1-59, wherein the first ligand is a cancer antigen.
62. The allogeneic immune cell of any one of embodiments 1-59, wherein the first ligand is selected from the group of antigens in Table.
63. The allogeneic immune cell of embodiment 62, wherein the first ligand binding domain is isolated or derived from the antigen binding domain of an antibody in Table.
64. The allogeneic immune cell of any one of embodiments 1-59, wherein the first ligand is selected from the group consisting of transferrin receptor (TFRC), epidermal growth factor receptor (EGFR), CEA cell adhesion molecule 5 (CEA), CD19 molecule (CD19), erb-b2 receptor tyrosine kinase 2 (HER2), and mesothelin (MSLN), or a peptide antigen thereof.
65. The allogeneic immune cell of any one of embodiments 1-59, wherein the first ligand is a pan-HLA ligand.
66. The allogeneic immune cell of any one of embodiments 1-59, wherein the first ligand comprises HLA-A, HLA-B, HLA-C, HLA-E, HLA-F, of HLA-G.
67. The allogeneic immune cell of any one of embodiments 1-69, wherein the first engineered receptor is a T cell receptor (TCR) or a chimeric antigen receptor (CAR).
68. The allogeneic immune cell of any one of embodiments 1-67, wherein the second engineered receptor is a T cell receptor (TCR) or a chimeric antigen receptor (CAR).
69. The allogeneic immune cell of any one of embodiments 1-68, wherein the first ligand binding domain comprises a single chain FAT antibody fragment (scFv) or a β chain variable domain (Vβ).
70. The allogeneic immune cell of any one of embodiments 1-68, wherein the first ligand binding domain comprises a TCR α chain variable domain and a TCR β chain variable domain.
71. The allogeneic immune cell of any one of embodiments 1-68, wherein the first ligand binding domain comprises a variable heavy chain (VH) domain and a variable light chain (VL) domain.
72. The allogeneic immune cell of embodiment 69, wherein the first ligand is EGFR or a peptide antigen thereof, and the first ligand binding domain comprises a sequence of SEQ ID NO: 99, SEQ ID NO: 101, SEQ ID NO: 103, SEQ ID NO: 105, SEQ ID NO: 107, SEQ ID NO: 109, SEQ ID NO: 111, SEQ ID NO: 113, SEQ ID NO: 115 or SEQ ID NO: 381, or a sequence having at least 90%, at least 95% or at least 99% identity thereto.
73. The allogeneic immune cell of embodiment 69, wherein the first ligand is MSLN or a peptide antigen thereof, and the first ligand binding domain comprises a sequence of SEQ ID NO: 83, SEQ ID NO: 85, SEQ ID NO: 87 or SEQ ID NO: 89, or a sequence having at least 90%, at least 95% or at least 99% identity thereto.
74. The allogeneic immune cell of embodiment 69, wherein the first ligand is CEA or a peptide antigen thereof, and the first ligand binding domain comprises SEQ ID NO: 91, SEQ ID NO: 93, SEQ ID NO: 95, SEQ ID NO: 97, SEQ ID NO: 273, SEQ ID NO: 275, or SEQ ID NO: 277, or a sequence having at least 90%, at least 95% or at least 99% identity thereto.
75. The allogeneic immune cell of embodiment 69, wherein the first ligand is CD19 or a peptide antigen thereof, and the first ligand binding domain comprises SEQ ID NO: 266 or SEQ ID NO: 268, or a sequence having at least 90%, at least 95% or at least 99% identity thereto.
76. The allogeneic immune cell of embodiment 69, wherein the first ligand comprises a pan-HLA ligand, and the first ligand binding domain comprises a sequence of SEQ ID NO: 163, SEQ ID NO: 165, SEQ ID NO: 167, SEQ ID NO: 169, SEQ ID NO: 171, or SEQ ID NO: 173, or a sequence having at least 90%, at least 95% or at least 99% identity thereto.
77. The allogeneic immune cell of any one of embodiments 69-71, wherein the first ligand comprises EGFR or a peptide antigen thereof, and the first ligand binding domain comprises CDRs selected from SEQ ID NOs: 129-162.
78. The allogeneic immune cell of any one of embodiments 69-71, wherein the first ligand comprises a CEA ligand, or a peptide antigen thereof, and the first ligand binding domain comprises CDRs selected from SEQ ID NOs: 285-293.
79. The allogeneic immune cell of any one of embodiments 1-78, wherein the second ligand binding domain comprises an ScFv or a Vβ domain.
80. The allogeneic immune cell of any one of embodiments 1-78, wherein the second ligand binding domain comprises a TCR α chain variable domain and a TCR β chain variable domain.
81. The allogeneic immune cell of any one of embodiments 1-78, wherein the first ligand binding domain comprises a variable heavy chain (VH) domain and a variable light chain (VL) domain.
82. The allogeneic immune cell of embodiment 81, wherein the second ligand comprises HA-1, and wherein the second ligand binding domain comprises a TCR alpha variable domain comprising SEQ ID NO: 195 or a sequence having at least 90%, at least 95%, or at least 99% identity thereto, and a TCR beta variable domain comprising SEQ ID NO: 196 or a sequence having at least 90%, at least 95%, or at least 99% identity thereto.
83. The allogeneic immune cell of embodiment 79, wherein the second ligand comprises an HLA-A*02 allele, and wherein the second ligand binding domain comprises any one of SEQ ID NOs: 50-61 or a sequence having at least 90%, at least 95%, or at least 99% identity thereto.
84. The allogeneic immune cell of any one of embodiments 79-81, wherein the second ligand comprises an HLA-A*02 allele, and the second ligand binding domain comprises CDRs selected from SEQ ID NOs: 39-49.
85. The allogeneic immune cell of any one of embodiment 1-84, wherein the second engineered receptor comprises at least one immunoreceptor tyrosine-based inhibitory motif (ITIM).
86. The allogeneic immune cell of any one of embodiments 1-85, wherein the second engineered receptor comprises a LILRB1 intracellular domain or a functional variant thereof.
87. The allogeneic immune cell of embodiment 86, wherein the LILRB1 intracellular domain comprises a sequence at least 95% identical to SEQ ID NO: 73.
88. The allogeneic immune cell of any one of embodiments 1-87, wherein the second engineered receptor comprises a LILRB1 transmembrane domain or a functional variant thereof.
89. The allogeneic immune cell of embodiment 88, wherein the LILRB1 transmembrane domain or a functional variant thereof comprises a sequence at least 95% identical to SEQ ID NO: 82.
90. The allogeneic immune cell of any one of embodiments 1-89, wherein the second engineered receptor comprises a LILRB1 hinge domain or functional fragment or variant thereof.
91. The allogeneic immune cell of embodiment 90, wherein the LILRB1 hinge domain comprises a sequence at least 95% identical to SEQ ID NO: 81, SEQ ID NO: 74 or SEQ ID NO: 75.
92. The allogeneic immune cell of any one of embodiments 1-89, wherein the second engineered receptor comprises a LILRB1 intracellular domain and a LILRB1 transmembrane domain, or a functional variant thereof.
93. The allogeneic immune cell of embodiment 92, wherein the LILRB1 intracellular domain and LILRB1 transmembrane domain comprises SEQ ID NO: 77 or a sequence at least 95% identical to SEQ ID NO: 77.
94. The allogeneic immune cell of any one of embodiments 1-89, wherein the second engineered receptor comprises a first polypeptide comprising SEQ ID NO: 77 or a sequence at least 95% identity thereto fused to a TCR alpha variable domain, and a second polypeptide comprising SEQ ID NO: 77 or a sequence at least 95% identity thereto fused to a TCR beta variable domain.
95. The allogeneic immune cell of any one of embodiments 1-94, wherein the first and second receptors are expressed on the surface of the immune cell at a ratio between about 1:10 to 10:1 first receptor to second receptor.
96. The allogeneic immune cell of any one of embodiments 1-94, wherein the first and second receptors are expressed on the surface of the immune cell at a ratio between about 1:3 to 3:1 first receptor to second receptor.
97. The allogeneic immune cell of any one of embodiments 1-96, wherein the immune cell is selected form the group consisting of T cells, B cells and Natural Killer (NK) cells.
98. The allogeneic immune cell of any one of the preceding embodiments, wherein the immune cell is non-natural.
99. The allogeneic immune cells of any one of the preceding embodiments, wherein the immune cell is isolated.
100. The allogeneic immune cell of any one of the preceding embodiments, for use as a medicament.
101. The allogeneic immune cell of embodiment 100, wherein the medicament is for the treatment of cancer in a subject.
102. A pharmaceutical composition, comprising a plurality of the allogeneic immune cells of any one of embodiments 1-101.
103. The pharmaceutical composition of embodiment 102, comprising a pharmaceutically acceptable carrier, diluent or excipient.
104. The pharmaceutical composition of embodiment 101 or 102, comprising a therapeutically effective amount of the allogeneic immune cells.
105. A method of increasing the specificity of an adoptive cell therapy in a subject, comprising administering to the subject a plurality of the allogeneic immune cell of any one of embodiments 1-57 or the pharmaceutical composition of any one of embodiments 102-104.
106. A method of treating cancer with an adoptive cell therapy, comprising administering to the subject a plurality of the allogeneic immune cell of any one of embodiments 1-101 or the pharmaceutical composition of any one of embodiments 102-104.
107. The method of embodiment 106, wherein cells of the cancer express the first ligand.
108. The method of any one of embodiments 106 or 107, wherein cells of the cancer do not express the second ligand due to loss of heterozygosity or loss of Y chromosome.
109. The method of any one of embodiments 106-108, wherein non-target cells express both the first ligand and the second ligand.
110. The method of any one of embodiments 105-109, comprising administering a lymphodepletion agent to the subject.
111. The method of embodiment 110, wherein the lymphodepletion agent specifically targets CD52.
112. A method of making the allogeneic immune cell of any one of embodiments 1-101, comprising
a. providing a plurality of allogeneic immune cells; and
b. transforming the immune cells with a vector encoding a first engineered receptor comprising a transmembrane region and an extracellular region, the extracellular region comprising a first ligand binding domain capable of specifically binding a first ligand, and a vector encoding a second engineered receptor comprising a transmembrane region and an extracellular region, the extracellular region comprising a second ligand binding domain capable of specifically binding a second ligand;
wherein binding of the first ligand binding domain to the first ligand activates or promotes activation of the immune cell, and
wherein binding of the second ligand binding domain to a second ligand inhibits activation of the immune cell by the first ligand.
113. A kit comprising the immune cell of any one of embodiments 1-98 or the pharmaceutical composition of any one of embodiments 102-104.
114. The kit of embodiment 113, further comprising instructions for use.
115. A method for producing an allogeneic immune cell, the method comprising obtaining an immune cell from or derived from a donor and causing the cell to express activating and blocking receptors, wherein:
the activating receptors induce a cytotoxic response when the cell encounters a target cell; the blocking receptors block the cytotoxic response when the cell encounters a non-target cell and constitutively block immune responses endogenous to the donor.
116. The method of embodiment 115, wherein the immune cell expresses one or more T cell receptor (TCR) endogenous to the donor.
117. The method of embodiment 116, wherein the blocking receptors constitutively block an immune response caused by activation of the endogenous TCR when the immune cell encounters a non-target cell.
118. The method of embodiment 117, wherein the blocking receptors reduce activation of the endogenous TCR.
119. The method of embodiment 117, wherein the blocking receptors reduce expression of the endogenous TCR.
120. The method of embodiment 115, further comprising modifying the immune cell to reduce or eliminate expression of one or more endogenous TCR.
121. The method of embodiment 120, wherein modifying the obtained immune cell includes inducing a genetic modification of a TRCA, TRB, CD3D, CD3E CD3G, or CD3Z locus of the cell.
122. The method of embodiment 115, further comprising modifying the immune cell to reduce or eliminate expression or function of a component of the major histocompatibility class I complex (MHC I) of the cell.
123. The method of embodiment 122, wherein modifying the component of the MHC I reduces targeting of the immune cell by cytolytic T cells.
124. The method of embodiment 123, wherein the component of the MCH I is a B2M locus.
125. The method of embodiment 115, further comprising tuning an endogenous immune response by altering the amount of the blocking receptor expressed on the immune cell.
126. The method of embodiment 125, wherein tuning comprises increasing the amount of blocking receptor expressed to reduce or eliminate the endogenous immune response.
127. The method of embodiment 126, further comprising obtaining a sample comprising non-target cells from a patient, measuring the endogenous immune response of the immune cell in the presence of cells from the sample, and tuning the expression of the blocking receptor such that the level of the endogenous immune response falls below a threshold.
128. A method for treating cancer, the method comprising:
providing to a patient an allogeneic immune cell that expresses activating receptors and blocking receptors, wherein:
binding of the activating receptor to an activating ligand on a cancer cell promotes a cytotoxic response, and
expression of the blocking receptor eliminates or reduces an endogenous immune response in the immune cell.
129. The method of embodiment 128, wherein binding of the blocking receptor to a blocking ligand on a non-target cell inhibits the cytotoxic response promoted by the activating receptor.
130. The method of embodiment 129, wherein the reduced or eliminated endogenous immune response eliminates or reduces graft versus host disease (GvHD) caused by the immune cell in the patient.
131. The method of embodiment 130, wherein expression of the blocking receptor reduces or eliminates the expression of a TCR endogenous to the immune cell.
132. The method of embodiment 130, wherein expression of the blocking receptor reduces or eliminates activation of a TCR endogenous to the immune cell.
133. The method of embodiment 129, wherein the immune cell includes a modification of a component of the MHC I that reduces targeting of the immune cell by cytolytic T cells of the patient.
134. The method of embodiment 133, wherein the modification reduces or eliminates expression of B2M in the immune cell.
135. An engineered allogeneic immune cell, wherein the cell is from or derived from a donor and caused to express activating and blocking receptors, wherein:
[0933] the activating receptors induce a cytotoxic response when the cell encounters a target cell;
   the blocking receptors block the cytotoxic response when the cell encounters a non-target cell and constitutively block immune responses endogenous to the donor.
   136. The cell of embodiment 135, wherein the cell expresses one or more T cell receptors (TCRs) endogenous to the donor.
   137. The cell of embodiment 136, wherein the blocking receptors constitutively block an immune response caused by activation of the endogenous TCR when the immune cell encounters a non-target cell.
   138. The cell of embodiment 137, wherein the blocking receptors reduce activation of the endogenous TCR.
   139. The cell of embodiment 137, wherein the blocking receptors reduce expression of the endogenous TCR.
   140. The cell of embodiment 135, wherein the cell further includes a modification that reduces or eliminates expression of one or more endogenous TCR.
   141. The cell of embodiment 140, wherein the modification is a genetic modification of a TRCA, TRB, CD3D, CD3E, CD3G, or CD3Z locus of the cell.
   142. The cell of embodiment 135, wherein the cell further comprises a modification that reduces or eliminates expression of a component of the MHC I.
   143. The cell of embodiment 142, wherein the modification to the component of the MHC I reduces targeting of the immune cell by cytolytic T cells.

### Representative Embodiments—Set 2

[0934] 1. An immune cell comprising

[0935] an inhibitory receptor comprising a ligand binding domain specific to a class I major histocompatibility complex (MHC-I) molecule, or a peptide-MHC complex thereof;

[0936] wherein the immune cell comprises one or more modifications that reduce autocrine binding/signaling by the receptor.
[0937] 2. The immune cell of embodiment 1, wherein the one or more modifications comprise an inactivating mutation in an endogenous gene encoding an allele of an endogenous MHC class I polypeptide specifically bound by the inhibitory receptor.
[0938] 3. The immune cell of embodiment 2, wherein the gene encoding the MHC class I polypeptide is HLA-A, HLA-B, and/or HLA-C.
[0939] 4. The immune cell of embodiment 2, wherein the gene encoding the MHC class I polypeptide is HLA-A.
[0940] 5. The immune cell of embodiment 2, wherein the gene encoding the MHC class I polypeptide is HLA-A*02.
[0941] 6. The immune cell of embodiment 2, wherein the gene encoding the MHC class I polypeptide is HLA-A*02:01.
[0942] 7. The immune cell of any one of embodiments 2-6, wherein modifying the gene encoding the MHC class I polypeptide comprises deleting all or a portion of the gene.
[0943] 8. The immune cell of any one of embodiments 2-6, wherein modifying the gene encoding the MHC class I polypeptide comprises introducing a mutation in the gene.
[0944] 9. The immune cell of embodiment 8, wherein the mutation comprises a deletion, insertion, substitution, or frameshift mutation.
[0945] 10. The immune cell of any one of embodiments 7-9, wherein modifying the gene comprises using a nucleic acid guided endonuclease.
[0946] 11. The immune cell of embodiment 10, wherein the nucleic acid guided endonuclease is selected from the group consisting of Cas1, Cas1B, Cas2, Cas3, Cas4, Cas5, Cas6, Cas7, Cas8, Cas9, Cas10, Csy1, Csy2, Csy3, Cse1, Cse2, Csc1, Csc2, Csa5, Csn2, Csm2, Csm3, Csm4, Csm5, Csm6, Cmr1, Cmr3, Cmr4, Cmr5, Cmr6, Csb1, Csb2, Csb3, Csx17, Csx14, Csx10, Csx16, CsaX, Csx3, Csx1, Csx15, Csf1, Csf2, Csf3, Csf4, homologs thereof, or modified versions thereof
[0947] 12. The immune cell of embodiment 11, wherein the nucleic acid endonuclease is Cas9.
[0948] 13. The immune cell of any one of embodiments 7-12, wherein the immune cell is modified with a nucleic acid guided endonuclease in a complex with at least one guide nucleic acids (gNAs) that specifically targets the sequence of an HLA-A locus.
[0949] 14. The immune cell of embodiment 13, wherein the gNAs comprise a sequence that shares about 90%, about 95%, about 96%, about 97%, about 98%, or about 99% identity to a sequence selected from SEQ ID NOs: 390-3276.
[0950] 15. The immune cell of embodiment 13, wherein the gNAs comprise a sequence selected from SEQ ID NOs: 390-3276.
[0951] 16. The immune cell of any one of embodiments 7-12, wherein the immune cell is modified with a nucleic acid guided endonuclease in a complex with at least one guide nucleic acids (gNAs) that specifically targets a sequence of HLA-A*02 alleles.
[0952] 17. The immune cell of embodiment 16, wherein the gNAs comprise a sequence that shares about 90%, about 95%, about 96%, about 97%, about 98%, or about 99% identity to a sequence selected from SEQ ID NOs: 390-1585.
[0953] 18. The immune cell of embodiment 17, wherein the gNAs comprise a sequence selected from SEQ ID NOs: 390-1585.
[0954] 19. The immune cell of any one of embodiments 7-12, wherein the immune cell is modified with a nucleic acid guided endonuclease in a complex with at least one guide nucleic acids (gNAs) that specifically targets a sequence of HLA-A*02:01 alleles.
[0955] 20. The immune cell of embodiment 19, wherein the gNAs comprise a sequence that shares about 90%, about 95%, about 96%, about 97%, about 98%, or about 99% identity to a sequence selected from SEQ ID NOs: 390-1174.
[0956] 21. The immune cell of embodiment 20, wherein the gNAs comprise a sequence selected from SEQ ID NOs: 390-1174.
[0957] 22. The immune cell of any one of embodiments 7-12, wherein the immune cell is modified with a nucleic acid guided endonuclease in a complex with at least one guide nucleic acids (gNAs) that specifically targets a sequence of HLA-A*02:01:01 alleles.
[0958] 23. The immune cell of embodiment 22, wherein the gNAs comprise a sequence that shares about 90%, about 95%, about 96%, about 97%, about 98%, or about 99% identity to a sequence selected from SEQ ID NOs: 390-1166.
[0959] 24. The immune cell of embodiment 23, wherein the gNAs comprise a sequence selected from SEQ ID NOs: 390-1166.
[0960] 25. The immune cell of any one of embodiments 7-12, wherein the immune cell is modified with a nucleic acid guided endonuclease in a complex with at least one guide nucleic acids (gNAs) that specifically targets a sequence of HLA-A*02:01:01:01 alleles.
[0961] 26. The immune cell of embodiment 25, wherein the gNAs comprise a sequence that shares about 90%, about 95%, about 96%, about 97%, about 98%, or about 99% identity to a sequence selected from SEQ ID NOs: 390-1126.
[0962] 27. The immune cell of embodiment 26, wherein the gNAs comprise a sequence selected from SEQ ID NOs: 390-1126.
[0963] 28. The immune cell of any one of embodiments 7-12, wherein the immune cell is modified with a nucleic acid guided endonuclease in a complex with at least one guide nucleic acids (gNAs) that specifically targets a coding DNA sequence of HLA-A*02.
[0964] 29. The immune cell of embodiment 28, wherein the gNAs comprise a sequence that shares about 90%, about 95%, about 96%, about 97%, about 98%, or about 99% identity to a sequence selected from SEQ ID NOs: 390-509.
[0965] 30. The immune cell of embodiment 29, wherein the gNAs comprise SEQ ID NOs: 390-509.
[0966] 31. The immune cell of any one of embodiments 7-12, wherein the immune cell is modified with a nucleic acid guided endonuclease in a complex with at least one guide nucleic acids (gNAs) that specifically targets a coding DNA sequence that is shared by more than 1000 HLA-A*02 alleles.
[0967] 32. The immune cell of embodiment 31, wherein the gNAs comprise a sequence that shares about 90%, about 95%, about 96%, about 97%, about 98%, or about 99% identity to a sequence selected from SEQ ID NOs: 390-455.
[0968] 33. The immune cell of embodiment 32, wherein the gNAs comprise a sequence selected from SEQ ID NOs: 390-455.
[0969] 34. The immune cell of embodiment 33, wherein the gNAs comprise a sequence that shares about 90%, about 95%, about 96%, about 97%, about 98%, or about 99% identity to a sequence selected from SEQ ID NOs: 394, 407, 408, 414, 421, 423, 426, 429, 433, 435, 438, 440, 448, 451, 454.
[0970] 35. The immune cell of embodiment 34, wherein the gNAs comprise SEQ ID NOs: 394, 407, 408, 414, 421, 423, 426, 429, 433, 435, 438, 440, 448, 451, 454.
[0971] 36. The immune cell of embodiment 34, wherein the gNAs comprise a sequence that shares about 90%, about 95%, about 96%, about 97%, about 98%, or about 99% identity to SEQ ID NO: 394.
[0972] 37. The immune cell of embodiment 36, wherein the gNAs comprise SEQ ID NO: 394.
[0973] 38. The immune cell of embodiment 34, wherein the gNAs comprise a sequence that shares about 90%, about 95%, about 96%, about 97%, about 98%, or about 99% identity to SEQ ID NO: 423.
[0974] 39. The immune cell of embodiment 38, wherein the gNAs comprise SEQ ID NO: 423.
[0975] 40. The immune cell of any one of the preceding embodiments, wherein the immune cell is a T cell, B cell, or Natural Killer (NK) cell.
[0976] 41. The immune cell of any one of the preceding embodiments, wherein the immune cell is non-natural.
[0977] 42. The immune cell of any one of the preceding embodiments, wherein the immune cell is isolated.
[0978] 43. The immune cell of any one of the preceding embodiments, for use as a medicament.
[0979] 44. The immune cell of embodiment 43, wherein the medicament is for the treatment of cancer in a subject.
[0980] 45. A pharmaceutical composition, comprising a plurality of the immune cells of any one of embodiments 1-44.
[0981] 46. The pharmaceutical composition of embodiment 45, comprising a pharmaceutically acceptable carrier, diluent, or excipient.
[0982] 47. The pharmaceutical composition of embodiment 45 or 46, comprising a therapeutically effective amount of the immune cells.
[0983] 48. A method of treating cancer with an adoptive cell therapy, comprising administering to the subject a plurality of the immune cell of any one of embodiments 1-44 or the pharmaceutical composition of any one of embodiments 45-47.
[0984] 49. The immune cell of any one of embodiments 1-44, wherein the immune cell is autologous to a subject.
[0985] 50. The immune cell of any one of embodiments 1-44, wherein the immune cell is allogeneic to a subject.
[0986] 51. A method of producing an immune cell with reduced autocrine binding/signaling comprising:
   [0987] a. transducing the immune cell with a vector comprising a sequence encoding a nucleic acid-guided endonuclease, thereby producing an immune cell expressing the nuclease; and
   [0988] b. transfecting the immune cell with at least one guide nucleic acid (gNA) complementary to a target sequence of a target gene selected from the group consisting of HLA-A, HLA-B, HLA-C, or an allele thereof,

[0989] wherein the gNA binds to the target sequence and the nuclease cleaves the target sequence, thereby producing a modified target gene.
[0990] 52. The method of embodiment 51, wherein the target gene comprises HLA-A*02.
[0991] 53. The method of embodiment 51 or 52, wherein the nuclease cleaves the target sequence to generate a single stranded or double stranded break.
[0992] 54. The method of embodiment 53, wherein the double strand break is repaired by non-homologous end joining (NHEJ), thereby producing a deletion in the target gene.
[0993] 55. The method of embodiment 54, wherein the deletion produces a truncated target gene or a frameshift mutation in the target gene.
[0994] 56. The method of any one of embodiments 51-55, wherein the nuclease is selected from the group consisting of Cas1, Cas1B, Cas2, Cas3, Cas4, Cas5, Cas6, Cas7, Cas8, Cas9, Cas10, Csy1, Csy2, Csy3, Cse1, Cse2, Csc1, Csc2, Csa5, Csn2, Csm2, Csm3, Csm4, Csm5, Csm6, Cmr1, Cmr3, Cmr4, Cmr5, Cmr6, Csb1, Csb2, Csb3, Csx17, Csx14, Csx10, Csx16, CsaX, Csx3, Csx1, Csx15, Csf1, Csf2, Csf3, Csf4, homologs thereof, or modified versions thereof.
[0995] 57. The method of embodiment 56, wherein the nuclease is Cas9.
[0996] 58. The method of any one of embodiments 51-57, wherein the immune cell is modified with a nucleic acid guided endonuclease in a complex with at least one guide nucleic acids (gNAs) that specifically targets the sequence of an HLA-A locus.
[0997] 59. The method of embodiment 58, wherein the gNAs comprise a sequence that shares about 90%, about 95%, about 96%, about 97%, about 98%, or about 99% identity to a sequence selected from SEQ ID NOs: 4390-3276.
[0998] 60. The method of embodiment 59, wherein the gNAs comprise a sequence selected from SEQ ID NOs: 390-3276.
[0999] 61. The method of any one of embodiments 51-57, wherein the immune cell is modified with a nucleic acid guided endonuclease in a complex with at least one guide nucleic acids (gNAs) that specifically targets a sequence of HLA-A*02 alleles.
[1000] 62. The method of embodiment 61, wherein the gNAs comprise a sequence that shares about 90%, about 95%, about 96%, about 97%, about 98%, or about 99% identity to a sequence selected from SEQ ID NOs: 390-1585.
[1001] 63. The method of embodiment 62, wherein the gNAs comprise a sequence selected from SEQ ID NOs: 390-1585.
[1002] 64. The method of any one of embodiments 51-57, wherein the immune cell is modified with a nucleic acid guided endonuclease in a complex with at least one guide nucleic acids (gNAs) that specifically targets a sequence of HLA-A*02:01 alleles.
[1003] 65. The method of embodiment 64, wherein the gNAs comprise a sequence that shares about 90%, about 95%, about 96%, about 97%, about 98%, or about 99% identity to a sequence selected from SEQ ID NOs: 390-1174.
[1004] 66. The method of embodiment 65, wherein the gNAs comprise a sequence selected from SEQ ID NOs: 390-1174.
[1005] 67. The method of any one of embodiments 51-57, wherein the immune cell is modified with a nucleic acid guided endonuclease in a complex with at least one guide nucleic acids (gNAs) that specifically targets a sequence of HLA-A*02:01:01 alleles.
[1006] 68. The method of embodiment 67, wherein the gNAs comprise a sequence that shares about 90%, about 95%, about 96%, about 97%, about 98%, or about 99% identity to a sequence selected from SEQ ID NOs: 390-1166.
[1007] 69. The method of embodiment 68, wherein the gNAs comprise a sequence selected from SEQ ID NOs: 390-1166.
[1008] 70. The method of any one of embodiments 51-57, wherein the immune cell is modified with a nucleic acid guided endonuclease in a complex with at least one guide nucleic acids (gNAs) that specifically targets a sequence of HLA-A*02:01:01:01 alleles.
[1009] 71. The method of embodiment 70, wherein the gNAs comprise a sequence that shares about 90%, about 95%, about 96%, about 97%, about 98%, or about 99% identity to a sequence selected from SEQ ID NOs: 390-1126.
[1010] 72. The method of embodiment 71, wherein the gNAs comprise a sequence selected from SEQ ID NOs: 390-1126.
[1011] 73. The method of any one of embodiments 51-57, wherein the immune cell is modified with a nucleic acid guided endonuclease in a complex with at least one guide nucleic acids (gNAs) that specifically targets a coding DNA sequences of HLA-A*02.
[1012] 74. The method of embodiment 73, wherein the gNAs comprise a sequence that shares about 90%, about 95%, about 96%, about 97%, about 98%, or about 99% identity to a sequence selected from SEQ ID NOs: 390-509.
[1013] 75. The method of embodiment 74, wherein the gNAs comprise SEQ ID NOs: 390-509.
[1014] 76. The method of any one of embodiments 51-57, wherein the immune cell is modified with a nucleic acid guided endonuclease in a complex with at least one guide nucleic acids (gNAs) that specifically targets a coding DNA sequence that is shared by more than 1000 HLA-A*02 alleles.
[1015] 77. The method of embodiment 76, wherein the gNAs comprise a sequence that shares about 90%, about 95%, about 96%, about 97%, about 98%, or about 99% identity to a sequence selected from SEQ ID NOs: 390-455.
[1016] 78. The method of embodiment 77, wherein the gNAs comprise a sequence selected from SEQ ID NOs: 390-455.
[1017] 79. The method of embodiment 78, wherein the gNAs comprise a sequence that shares about 90%, about 95%, about 96%, about 97%, about 98%, or about 99% identity to a sequence selected from SEQ ID NOs: 394, 407, 408, 414, 421, 423, 426, 429, 433, 435, 438, 440, 448, 451, 454.
[1018] 80. The method of embodiment 79, wherein the gNAs comprise SEQ ID NOs: 394, 407, 408, 414, 421, 423, 426, 429, 433, 435, 438, 440, 448, 451, 454.
[1019] 81. The method of embodiment 80, wherein the gNAs comprise a sequence that shares about 90%, about 95%, about 96%, about 97%, about 98%, or about 99% identity to SEQ ID NO: 394.
[1020] 82. The method of embodiment 81, wherein the gNAs comprise SEQ ID NO: 394.
[1021] 83. The method of embodiment 80, wherein the gNAs comprise a sequence that shares about 90%, about 95%, about 96%, about 97%, about 98%, or about 99% identity to SEQ ID NO: 423.
[1022] 84. The method of embodiment 83, wherein the gNAs comprise SEQ ID NO: 423.
[1023] 85. The method of any one of embodiments 51-84, comprising transducing the immune cell with a first vector comprising a sequence encoding the activator receptor and a second vector comprising a sequence encoding the inhibitory receptor, thereby producing an immune cell expressing the activator and inhibitory receptors.
[1024] 86. The method of any one of embodiments 51-84, wherein, prior to the transducing and/or transfecting steps, the immune cell comprises a polynucleotide encoding activator and inhibitory receptors.
[1025] 87. The method of embodiments 85 or 86, wherein the inhibitory receptor specifically binds to an HLA-A*02 pMHC antigen and the target gene comprises HLA-A*02.
[1026] 88. A method of manufacturing a composition comprising immune cells with reduced autocrine binding/signaling comprising:
   [1027] a. providing immune cells from a subject suffering from or at risk for cancer or a hematological malignancy
   [1028] b. transducing the immune cell with a vector comprising a sequence encoding a nucleic acid-guided endonuclease, thereby producing an immune cell expressing the nuclease; and
   [1029] c. transfecting the immune cell with at least one guide nucleic acid (gNA) complementary to a target sequence of a target gene selected from the group consisting of HLA-A, HLA-B, HLA-C, or an allele thereof,

[1030] wherein the gNA binds to the target sequence and the nuclease cleaves the target sequence, thereby producing a modified target gene.
[1031] 89. The method of embodiment 88, wherein, prior to the transducing and/or transfecting steps, the immune cell comprises a polynucleotide encoding activator or inhibitory receptors.
[1032] 90. The method of embodiments 88 or 89, further comprising transducing the immune cell with a first vector comprising a sequence encoding the activator receptor and a second vector comprising a sequence encoding the inhibitory receptor, thereby producing an immune cell expressing the activator and inhibitory receptors.
[1033] 91. A method of treating a subject in need thereof comprising:
   [1034] a. providing immune cells from a subject suffering from or at risk for cancer or a hematological malignancy
   [1035] b. transducing the immune cell with a vector comprising a sequence encoding a nucleic acid-guided endonuclease, thereby producing an immune cell expressing the nuclease;
   [1036] c. transfecting the immune cell with at least one guide nucleic acid (gNA) complementary to a target sequence of a target gene selected from the group consisting of HLA-A, HLA-B, HLA-C, or an allele thereof, wherein the gNA binds to the target sequence and the nuclease cleaves the target sequence, thereby producing a modified target gene; and
   [1037] d. administering the immune cell to the subject.
[1038] 92. A guide RNA comprising a targeting sequence, wherein the targeting sequence is complementary to the sequence of a target gene selected from the group consisting of HLA-A, HLA-B, HLA-C, or an allele thereof
[1039] 93. The guide RNA of embodiment 92, wherein the target gene is a HLA-A locus.
[1040] 94. The guide RNA of embodiment 93, wherein the targeting sequence shares about 90%, about 95%, about 96%, about 97%, about 98%, or about 99% identity to a sequence selected from SEQ ID NOs: 390-3276.
[1041] 95. The guide RNA of embodiment 94, wherein the targeting sequence is selected from SEQ ID NOs: 390-3276.
[1042] 96. The guide RNA of embodiment 92, wherein the target gene is a HLA-B locus.
[1043] 97. The guide RNA of embodiment 92, wherein the target gene is a HLA-C locus.
[1044] 98. The guide RNA of any one of embodiments 93-95, wherein the target gene is a HLA-A allele.
[1045] 99. The guide RNA of embodiment 98, wherein the HLA-A allele comprises HLA-A*02,
[1046] 100. HLA-A*02:01, HLA-A*02:01:01, and/or HLA-A*02:01:01:01.
[1047] 100. The guide RNA of embodiment 99, wherein the HLA-A allele is HLA-A*02.
[1048] 101. The guide RNA of embodiment 100, wherein the targeting sequence shares about 90%, about 95%, about 96%, about 97%, about 98%, or about 99% identity to a sequence selected from SEQ ID NOs: 390-1585.
[1049] 102. The guide RNA of embodiment 101, wherein the targeting sequence is selected from SEQ ID NOs: 390-1585.
[1050] 103. The guide RNA of embodiment 99, wherein the HLA-A allele is HLA-A*02:01.
[1051] 104. The guide RNA of embodiment 103, wherein the targeting sequence shares about 90%, about 95%, about 96%, about 97%, about 98%, or about 99% identity to a sequence selected from SEQ ID NOs: 390-1174.
[1052] 105. The guide RNA of embodiment 104, wherein the targeting sequence is selected from SEQ ID NOs: 390-1174.
[1053] 106. The guide RNA of embodiment 99, wherein the HLA-A allele is HLA-A*02:01:01.
[1054] 107. The guide RNA of embodiment 106, wherein the targeting sequence shares about 90%, about 95%, about 96%, about 97%, about 98%, or about 99% identity to a sequence selected from SEQ ID NOs: 390-1166.
[1055] 108. The guide RNA of embodiment 107, wherein the targeting sequence is selected from SEQ ID NOs: 390-1166.
[1056] 109. The guide RNA of embodiment 99, wherein the HLA-A allele is HLA-A*02:01:01:01.
[1057] 110. The guide RNA of embodiment 109, wherein the targeting sequence shares about 90%, about 95%, about 96%, about 97%, about 98%, or about 99% identity to a sequence selected from SEQ ID NOs: 390-1126.
[1058] 111. The guide RNA of embodiment 110, wherein the targeting sequence is selected from SEQ ID NOs: 390-1126.
[1059] 112. The guide RNA of embodiment 99, wherein the targeting sequence targets a coding DNA sequences of the HLA-A*02 allele.
[1060] 113. The guide RNA of embodiment 112, wherein the targeting sequence shares about 90%, about 95%, about 96%, about 97%, about 98%, or about 99% identity to a sequence selected from SEQ ID NOs: 390-509.
[1061] 114. The guide RNA of embodiment 114, wherein the targeting sequence is selected from SEQ ID NOs: 390-509.
[1062] 115. The guide RNA of embodiment 112, wherein the targeting sequence targets a coding DNA sequence that is shared by more than 1000 HLA-A*02 alleles.
[1063] 116. The guide RNA of embodiment 115, wherein the targeting sequence shares about 90%, about 95%, about 96%, about 97%, about 98%, or about 99% identity to a sequence selected from SEQ ID NOs: 390-455.
[1064] 117. The guide RNA of embodiment 116, wherein the targeting sequence is selected from SEQ ID NOs: 390-455.
[1065] 118. The guide RNA of embodiment 115, wherein the targeting sequence shares about 90%, about 95%, about 96%, about 97%, about 98%, or about 99% identity to a sequence selected from SEQ ID NOs: 394, 407, 408, 14, 421, 423, 426, 429, 433, 435, 438, 440, 448, 451, 454.
[1066] 119. The guide RNA of embodiment 118, wherein the targeting sequence is selected from SEQ ID NOs: 394, 407, 408, 414, 421, 423, 426, 429, 433, 435, 438, 440, 448, 451, 454.
[1067] 120. The guide RNA of embodiment 115, wherein the targeting sequence shares about 90%, about 95%, about 96%, about 97%, about 98%, or about 99% identity to a sequence selected from SEQ ID NOs: 394.
[1068] 121. The guide RNA of embodiment 120, wherein the targeting sequence is selected from SEQ ID NOs: 394.
[1069] 122. The guide RNA of embodiment 115, wherein the targeting sequence shares about 90%, about 95%, about 96%, about 97%, about 98%, or about 99% identity to a sequence selected from SEQ ID NOs: 423.
[1070] 123. The guide RNA of embodiment 122, wherein the targeting sequence is selected from SEQ ID NOs: 423.
[1071] 124. The guide RNA of any one of embodiments 92 to 123, wherein the guide RNA scaffold sequence binds a nucleic acid guided endonuclease selected from Cas1, Cas1B, Cas2, Cas3, Cas4, Cas5, Cas6, Cas7, Cas8, Cas9, Cas10, Csy1, Csy2, Csy3, Cse1, Cse2, Csc1, Csc2, Csa5, Csn2, Csm2, Csm3, Csm4, Csm5, Csm6, Cmr1, Cmr3, Cmr4, Cmr5, Cmr6, Csb1, Csb2, Csb3, Csx17, Csx14, Csx10, Csx16, CsaX, Csx3, Csx1, Csx15, Csf1, Csf2, Csf3, Csf4, homologs thereof, or modified versions thereof
[1072] 125. The guide RNA of embodiment 124, wherein the nucleic acid guided endonuclease is

[1073] Cas9.
[1074] 126. The guide RNA of embodiment 124 or 125, wherein the nucleic acid guided endonuclease binds a PAM sequence.
[1075] 127. The guide RNA of embodiment 126, wherein the PAM sequence is NGG, NGCG, NGAG, NGAN, NGNG, NG, GAA, GAT, NNGRRT, NNGRRN, TTTV, TYCV, TATV, NNNNRYAC, NNNNGATT, NNAGAAW, NAAAAC, wherein N represents any nucleotide; V represents A, G, or C; R represents A or G; Y represents C or T; and W represents A or T.
[1076] 128. The guide RNA of any one of embodiments 71-93, further comprising a scaffold sequence.
[1077] 129. The guide RNA of embodiment 57, wherein the scaffold sequence is

(SEQ ID NO: 8345)
GTTTTAGAGCTAGAAATAGCAAGTTAAAATAAGGCTAGTCCGTTATCAAC
TTGAAAAAGTGGCACCGAGTCGGTGCTTTTTTT.

[1078] 130. A polynucleotide encoding the guide RNA of embodiments 92-129.
[1079] 131. The immune cell of any one of embodiments 7-12, wherein the immune cell is modified with a nucleic acid guided endonuclease in a complex with at least one guide nucleic acid (gNA) that specifically targets the sequence of an HLA-A, HLA-B, HLA-C, and HLA-G locus, or a combination thereof
[1080] 132. The immune cell of embodiment 131, wherein the gNA comprise a sequence that shares about 90%, about 95%, about 96%, about 97%, about 98%, or about 99% identity to a sequence selected from SEQ ID NO: 408.
[1081] 133. The immune cell of embodiment 132, wherein the gNA comprises SEQ ID NO: 408.
[1082] 134. The method of any one of embodiments 51-57, wherein the immune cell is modified with a nucleic acid guided endonuclease in a complex with at least one guide nucleic acids (gNAs) that specifically targets the sequence of an HLA-A, HLA-B, HLA-C, and HLA-G locus, or a combination thereof
[1083] 135. The method of embodiment 134, wherein the gNAs comprise a sequence that shares about 90%, about 95%, about 96%, about 97%, about 98%, or about 99% identity to a sequence selected from SEQ ID NO: 408.
[1084] 136. The immune cell of embodiment 135, wherein the gNA comprises SEQ ID NO: 408.
[1085] 137. The guide RNA of embodiment 92, wherein the target gene is a HLA-A, HLA-B, HLA-C, and HLA-G locus, or a combination thereof
[1086] 138. The guide RNA of embodiment 137, wherein the targeting sequence shares about 90%, about 95%, about 96%, about 97%, about 98%, or about 99% identity to a sequence selected from SEQ ID NOs: 408.
[1087] 139. The guide RNA of embodiment 138, wherein the targeting sequences comprises SEQ ID NO: 408.

### Representative Embodiments—Set 3

[1088] 1. An immune cell comprising:

[1089] at least one engineered receptor comprising a ligand binding domain specific to a class I major histocompatibility complex (MHC-I) molecule, or a peptide-MHC complex thereof;

[1090] wherein the immune cell comprises one or more modifications that reduce autocrine binding/signaling by the engineered receptor.
[1091] 2. The immune cell of embodiment 1, wherein the one or more modifications comprise an inactivating mutation to an endogenous gene encoding a beta 2 microglobulin (B2M) polypeptide.
[1092] 3. The immune cell of embodiment 1, wherein the inactivating mutation to the gene encoding B2M is a deletion of all or a portion of the gene.
[1093] 4. The immune cell of any one of embodiments 1-3, wherein the inactivating mutation to the gene encoding B2M is a deletion of all or a portion of the gene.
[1094] 5. The immune cell of any one of embodiments 1-3, wherein the inactivating mutation to the gene encoding B2M is a mutation in the gene or a promoter of the gene.
[1095] 6. The immune cell of embodiment 5, wherein the mutation comprises a deletion, insertion, substitution, or frameshift mutation.
[1096] 7. The immune cell of any one of embodiments 4-6, wherein the inactivating mutation to the gene encoding B2M is introduced by a nucleic acid guided endonuclease.
[1097] 8. The immune cell of embodiment 7, wherein the nucleic acid guided endonuclease is selected from the group consisting of Cas1, Cas1B, Cas2, Cas3, Cas4, Cas5, Cas6, Cas7, Cas8, Cas9, Cas10, Csy1, Csy2, Csy3, Cse1, Cse2, Csc1, Csc2, Csa5, Csn2, Csm2, Csm3, Csm4, Csm5, Csm6, Cmr1, Cmr3, Cmr4, Cmr5, Cmr6, Csb1, Csb2, Csb3, Csx17, Csx14, Csx10, Csx16, CsaX, Csx3, Csx1, Csx15, Csf1, Csf2, Csf3, Csf4, and homologs thereof, or modified versions thereof
[1098] 9. The immune cell of embodiment 8, wherein the nucleic acid endonuclease is Cas9.
[1099] 10. The immune cell of any one of embodiments 7-9, wherein the inactivating mutation is introduced with a nucleic acid guided endonuclease in a complex with at least one guide nucleic acid (gNA) that specifically targets a sequence within the B2M gene and/or a promoter of the B2M gene.
[1100] 11. The immune cell of embodiment 10, wherein the gNA comprises a sequence that shares about 80%, about 85%, about 90%, about 95%, about 96%, about 97%, about 98%, or about 99% identity to a sequence selected from SEQ ID NOs: 8357-8470.
[1101] 12. The immune cell of embodiment 10, wherein the gNA comprises a sequence selected from SEQ ID NOs: 8357-8470.
[1102] 13. The immune cell of embodiment 10, wherein the inactivating mutation is introduced with a nucleic acid guided endonuclease in a complex with at least one guide nucleic acid (gNA) that specifically targets a coding sequence (CDS) of the B2M gene.
[1103] 14. The immune cell of embodiment 13, wherein the gNA comprises a sequence that shares about 80%, about 85%, about 90%, about 95%, about 96%, about 97%, about 98%, or about 99% identity to a sequence selected from SEQ ID NOs: 8357-8397.
[1104] 15. The immune cell of embodiment 13, wherein the gNA comprises a sequence selected from SEQ ID NOs: 8357-8397.
[1105] 16. The immune cell of embodiment 10, wherein the inactivating mutation is introduced with a nucleic acid guided endonuclease in a complex with at least one guide nucleic acid (gNA) that specifically targets a promoter of the B2M gene.
[1106] 17. The immune cell of embodiment 16, wherein the gNA comprises a sequence that shares about 80%, about 85%, about 90%, about 95%, about 96%, about 97%, about 98%, or about 99% identity to a sequence selected from SEQ ID NOs: 8398-8470.
[1107] 18. The immune cell of embodiment 16, wherein the gNA comprises a sequence selected from SEQ ID NOs: 8398-8470.
[1108] 19. The immune cell of embodiment 10, wherein the gNA comprises a sequence that shares about 80%, about 85%, about 90%, about 95%, about 96%, about 97%, about 98%, or about 99% identity to SEQ ID NO: 8357-8365.
[1109] 20. The immune cell of embodiment 10, wherein the gNA comprises SEQ ID NO: 8357-8365.
[1110] 21. The immune cell of any one of embodiments 1-20, wherein the at least one engineered receptor comprises an activator receptor.
[1111] 22. The immune cell of embodiment 21, wherein the activator receptor is a chimeric antigen receptor (CAR) or T Cell Receptor (TCR).
[1112] 23. The immune cell of embodiment 21 or 22, wherein the activator receptor binds to a ligand expressed by a cancer cell of a subject.
[1113] 24. The immune cell of any one of embodiments 1-23, wherein the at least one engineered receptor comprises an inhibitory receptor.
[1114] 25. The immune cell of embodiment 24, wherein the inhibitory receptor inhibits activation of the immune cell by the activator receptor.
[1115] 26. The immune cell of embodiment 24 or 25, wherein the inhibitory receptor binds to a ligand that is lost in the cancer cell of the subject through loss of heterozygosity.
[1116] 27. The immune cell of any one of the preceding embodiments, wherein the immune cell is a T cell, B cell, or Natural Killer (NK) cell.
[1117] 28. The immune cell of any one of the preceding embodiments, wherein the immune cell is non-natural.
[1118] 29. The immune cell of any one of embodiments 1-26, wherein the immune cell is autologous to the subject.
[1119] 30. The immune cell of any one of embodiments 1-26, wherein the immune cell is allogeneic to the subject.
[1120] 31. The immune cell of any one of the preceding embodiments, wherein the immune cell is isolated.
[1121] 32. The immune cell of any one of the preceding embodiments, for use as a medicament.
[1122] 33. The immune cell of embodiment 31, wherein the medicament is for the treatment of cancer in a subject.
[1123] 34. A pharmaceutical composition, comprising a plurality of the immune cells of any one of embodiments 1-26.
[1124] 35. The pharmaceutical composition of embodiment 34, comprising a pharmaceutically acceptable carrier, diluent, or excipient.
[1125] 36. The pharmaceutical composition of embodiment 34 or 35, comprising a therapeutically effective amount of the immune cells.
[1126] 37. A method of treating a subject with cancer with an adoptive cell therapy, comprising administering to the subject a plurality of the immune cell of any one of embodiments 1-33 or the pharmaceutical composition of any one of embodiments 34-36.
[1127] 38. A method of producing an immune cell with reduced autocrine binding/signaling comprising:
   [1128] a. transducing the immune cell with a vector comprising a sequence encoding a nucleic acid-guided endonuclease, thereby producing an immune cell expressing the nuclease; and
   [1129] b. transfecting the immune cell with at least one guide nucleic acid (gNA) complementary to a target sequence within the B2M gene,

[1130] wherein the gNA binds to the target sequence and the nuclease cleaves the target sequence, thereby producing a modified B2M gene or B2M gene promoter.
[1131] 39. The method of embodiment 38, wherein the nuclease cleaves the target sequence to generate a single stranded or double stranded break.
[1132] 40. The method of embodiment 39, wherein the double strand break is repaired by non-homologous end joining (NHEJ), thereby producing a deletion in B2M
[1133] 41. The method of embodiment 40, wherein the deletion produces a truncated B2M gene or a frameshift mutation in the B2M gene.
[1134] 42. The method of any one of embodiments 38-41, wherein the nuclease is selected from the group consisting of Cas1, Cas1B, Cas2, Cas3, Cas4, Cas5, Cas6, Cas7, Cas8, Cas9, Cas10, Csy1, Csy2, Csy3, Cse1, Cse2, Csc1, Csc2, Csa5, Csn2, Csm2, Csm3, Csm4, Csm5, Csm6, Cmr1, Cmr3, Cmr4, Cmr5, Cmr6, Csb1, Csb2, Csb3, Csx17, Csx14, Csx10, Csx16, CsaX, Csx3, Csx1, Csx15, Csf1, Csf2, Csf3, Csf4, and homologs thereof, or modified versions thereof
[1135] 43. The method of embodiment 42, wherein the nuclease is Cas9.
[1136] 44. The method of any one of embodiments 38-43, wherein the gNA specifically targets a sequence within the B2M coding sequence, a B2M intron, a B2M regulatory element or a combination thereof.
[1137] 45. The method of embodiment 44, wherein the gNA comprises a sequence that shares about 80%, about 85%, about 90%, about 95%, about 96%, about 97%, about 98%, or about 99% identity to a sequence selected from SEQ ID NOs: 8357-8470.
[1138] 46. The method of embodiment 44, wherein the gNA comprises a sequence selected from SEQ ID NOs: 8357-8470.
[1139] 47. The method of embodiment 44, wherein the gNA specifically targets the coding sequence (CDS) of the B2M gene.
[1140] 48. The method of embodiment 47, wherein the gNA comprise a sequence that shares about 80%, about 85%, about 90%, about 95%, about 96%, about 97%, about 98%, or about 99% identity to a sequence selected from SEQ ID NOs: 8357-8397.
[1141] 49. The method of embodiment 47, wherein the gNA comprises a sequence selected from SEQ ID NOs: 8357-8397.
[1142] 50. The method of any one of embodiments 44, wherein the gNA specifically targets the promoter of the B2M gene.
[1143] 51. The method of embodiment 50, wherein the gNA comprises a sequence that shares about 80%, about 85%, about 90%, about 95%, about 96%, about 97%, about 98%, or about 99% identity to a sequence selected from SEQ ID NOs: 8398-8470.
[1144] 52. The method of embodiment 50, wherein the gNA comprises a sequence selected from SEQ ID NOs: 8398-8470.
[1145] 53. The method of embodiment 44, wherein the gNA comprises a sequence that shares about 80%, about 85%, about 90%, about 95%, about 96%, about 97%, about 98%, or about 99% identity to SEQ ID NO: 8357-8365.
[1146] 54. The method of embodiment 44, wherein the gNA comprises SEQ ID NO: 8357-8365.
[1147] 55. The method of any one of embodiments 38-54, comprising transducing the immune cell with a first vector comprising a sequence encoding the activator receptor and a second vector comprising a sequence encoding the inhibitory receptor, thereby producing an immune cell expressing the activator and inhibitory receptors.
[1148] 56. The method of any one of embodiments 38-55, wherein, prior to the transducing and/or transfecting steps, the immune cell comprises one or more polynucleotides encoding activator and/or inhibitory receptors.
[1149] 57. The method of embodiments 55 or 56, wherein the inhibitory receptor specifically binds to an HLA-A*02 pMHC antigen.
[1150] 58. A method of manufacturing a composition comprising plurality of immune cells with reduced autocrine binding/signaling comprising:
   [1151] a. providing immune cells from a subject suffering from or at risk of developing a cancer or a hematological malignancy
   [1152] b. transducing the plurality of immune cell with a vector comprising a sequence encoding a nucleic acid-guided endonuclease, thereby producing an immune cell expressing the nucleic acid-guided endonuclease; and
   [1153] c. transfecting the immune cell with at least one guide nucleic acid (gNA) complementary to a target sequence of a B2M gene,

[1154] wherein the gNA binds to the target sequence and the nuclease cleaves the target sequence, thereby producing a modified B2M gene.
[1155] 59. The method of embodiment 58, wherein, prior to the transducing and/or transfecting steps, the immune cell comprises at least one polynucleotide encoding activator or inhibitory receptors.
[1156] 60. The method of embodiments 58 or 59, further comprising transducing the immune cell with a first vector comprising a sequence encoding the activator receptor and a second vector comprising a sequence encoding the inhibitory receptor, thereby producing an immune cell expressing the activator and inhibitory receptors.
[1157] 61. A method of treating a subject in need thereof comprising:
   [1158] a. providing a plurality of immune cells from a subject suffering from or at risk of developing a cancer or a hematological malignancy;
   [1159] b. transducing the plurality of immune cells with a vector comprising a sequence encoding a nucleic acid-guided endonuclease, thereby producing an immune cell expressing the nucleic acid-guided endonuclease;
   [1160] c. transfecting the plurality of immune cells with at least one guide nucleic acid (gNA) complementary to a target sequence of a B2M gene, wherein the gNA binds to the target sequence and the nuclease cleaves the target sequence, thereby producing a modified B2M gene; and
   [1161] d. administering the plurality of immune cells to the subject.
[1162] 62. A guide nucleic acid (gNA) comprising a targeting sequence, wherein the targeting sequence is complementary to a sequence within the B2M gene or B2M gene promoter.
[1163] 63. The gNA of embodiment 62, wherein the targeting sequence shares about 80%, about 85%, about 90%, about 95%, about 96%, about 97%, about 98%, or about 99% identity to a sequence selected from SEQ ID NOs: 8357-8470.
[1164] 64. The gNA of embodiment 62, wherein the targeting sequence is selected from SEQ ID NOs: 8357-8470.
[1165] 65. The gNA of embodiment 62, wherein the gNA specifically targets the coding sequence (CDS) of the B2M gene.
[1166] 66. The gNA embodiment 65, wherein the targeting sequence shares about 80%, about 85%, about 90%, about 95%, about 96%, about 97%, about 98%, or about 99% identity to a sequence selected from SEQ ID NOs: 8357-8397.
[1167] 67. The gNA of embodiment 65, wherein the target sequence comprises a sequence selected from SEQ ID NOs: 8357-8397.
[1168] 68. The gNA of embodiment 62, wherein the gNA specifically targets a promoter of the B2M gene.
[1169] 69. The gNA of embodiment 68, wherein the targeting sequence shares about 80%, about 85%, about 90%, about 95%, about 96%, about 97%, about 98%, or about 99% identity to a sequence selected from SEQ ID NOs: 8398-8470.
[1170] 70. The gNA of embodiment 68, wherein the targeting sequence is selected from SEQ ID NOs: 8398-8470.
[1171] 71. The gNA of embodiment 62, wherein the targeting sequence shares about 80%, about 85%, about 90%, about 95%, about 96%, about 97%, about 98%, or about 99% identity to SEQ ID NO: 8357-8365.
[1172] 72. The gNA of embodiment 62, wherein the targeting sequence is selected from SEQ ID NO: 8357-8365.
[1173] 73. The gNA of any one of embodiments 62 to 72, wherein the gNA scaffold sequence binds a nucleic acid guided endonuclease selected from the group consisting of Cast, Cas1B, Cas2, Cas3, Cas4, Cas5, Cas6, Cas7, Cas8, Cas9, Cas10, Csy1, Csy2, Csy3, Cse1, Cse2, Csc1, Csc2, Csa5, Csn2, Csm2, Csm3, Csm4, Csm5, Csm6, Cmr1, Cmr3, Cmr4, Cmr5, Cmr6, Csb1, Csb2, Csb3, Csx17, Csx14, Csx10, Csx16, CsaX, Csx3, Csx1, Csx15, Csf1, Csf2, Csf3, Csf4, and homologs thereof, or modified versions thereof
[1174] 74. The gNA of embodiment 73, wherein the nucleic acid guided endonuclease is Cas9.
[1175] 75. The gNA of embodiment 73 or 74, wherein the target sequence is proximal to a PAM sequence.
[1176] 76. The gNA of embodiment 75, wherein the PAM sequence is NGG, NGCG, NGAG, NGAN, NGNG, NG, GAA, GAT, NNGRRT, NNGRRN, TTTV, TYCV, TATV, NNNNRYAC, NNNNGATT, NNAGAAW, or NAAAAC, wherein N represents any nucleotide; V represents A, G, or C; R represents A or G; Y represents C or T; and W represents A or T.
[1177] 77. The gNA of any one of embodiments 62-76, further comprising a scaffold sequence.
[1178] 78. The gNA of embodiment 77, wherein the scaffold sequence is encoded by a sequence of

(SEQ ID NO: 8345)
GTTTTAGAGCTAGAAATAGCAAGTTAAAATAAGGCTAGTCCGTTATCAAC
TTGAAAAAGTGGCACCGAGTCGGTGCTTTTTTT.

[1179] 79. A polynucleotide encoding the gNA of embodiments 62-78.
[1180] 80. The method of any one of embodiments 37-71, comprising transfecting the immune cell with 2 or more guide nucleic acids (gNAs) complementary to different target sequences within the B2M gene.
[1181] 81. A method of producing an immune cell with reduced autocrine binding/signaling comprising:

[1182] transfecting the immune cell with at least one guide nucleic acid (gNA) complementary to a target sequence within the B2M gene, wherein the gNA is in complex with a nucleic acid-guided endonuclease,

[1183] wherein the gNA binds to the target sequence and the nuclease cleaves the target

[1184] sequence, thereby producing a modified B2M gene.

### Representative Embodiments—Set 4

[1185] 1. An immune cell comprising

[1186] an inhibitory receptor comprising a ligand binding domain specific to a class I major histocompatibility complex (MHC-I) molecule, or a peptide-MHC complex thereof;

[1187] wherein expression and/or function of a human leukocyte antigen (HLA) polypeptide, or an allele thereof, in said immune cell has been reduced or eliminated.
[1188] 2. The immune cell of embodiment 1, wherein the HLA allele is an HLA-A, HLA-B, HLA-C, and/or HLA-E allele.
[1189] 3. The immune cell of embodiment 2, wherein the HLA-A allele is selected from HLA-A*02, HLA-A*02:01, HLA-A*02:01:01, and HLA-A*02:01:01:01.
[1190] 4. The immune cell of embodiment 3, wherein the HLA-A allele is HLA-A*02:01:01:01.
[1191] 5. The immune cell of any one of embodiments 1-4, further comprising an interfering RNA, comprising a sequence complementary to a sequence of a HLA-A*02:01:01:01 mRNA.
[1192] 6. The immune cell of embodiment 5, wherein the interfering RNA is capable of inducing RNAi-mediated degradation of the HLA-A*02:01:01:01 mRNA.
[1193] 7. The immune cell of embodiment 6, wherein the interfering RNA is a short hairpin RNA (shRNA).
[1194] 8. The immune cell of embodiment 7, wherein the shRNA comprises
   [1195] a. a first sequence, having from 5′ end to 3′ end a sequence complementary to the HLA-A*02:01:01:01 mRNA; and
   [1196] b. a second sequence, having from 5′ end to 3′ end a sequence complementary to the first sequence, wherein the first sequence and the second sequence form the shRNA.
[1197] 9. The immune cell of embodiment 8, wherein the HLA-A*02:01:01:01 mRNA sequence comprises a coding sequence.
[1198] 10. The immune cell of embodiment 8, wherein the HLA-A*02:01:01:01 mRNA sequence comprises an untranslated region.
[1199] 11. The immune cell of any one of embodiments 1 to 10, wherein the first sequence is 18, 19, 20, 21, or 22 nucleotides.
[1200] 12. The immune cell of embodiment 11, wherein the first sequence is complementary to a sequence selected from SEQ ID NOs: 8476-16870.
[1201] 13. The immune cell of embodiment 11, wherein the first sequence has GC content greater than or equal to 25% and less than 60%.
[1202] 14. The immune cell of embodiment 13, wherein the first sequence is complementary to a sequence selected from SEQ ID NOs: 8476-12066.
[1203] 15. The immune cell of embodiment 13, wherein the first sequence does not comprise 4 nucleotides of the same base or a run of seven C or G bases.
[1204] 16. The immune cell of embodiment 15, wherein the first sequence is complementary to a sequence selected from SEQ ID NOs: 8476-11584.
[1205] 17. The immune cell of embodiment 15, wherein the first sequence is selected from SEQ ID NOs: 8476-8754 or SEQ ID NOs: 8476-8561.
[1206] 18. The immune cell of any one of embodiments 8 to 17, wherein the first sequence and second sequence are present on a single stranded polynucleotide, wherein the first sequence and second sequence are separated by 4, 5, 6, 7, 8, 9, 10, 11, 12, 13, 14, or nucleotides, wherein the 4, 5, 6, 7, 8, 9, 10, 11, 12, 13, 14, or 15 nucleotides form a loop region in the shRNA.
[1207] 19. The immune cell of embodiment 18, wherein the loop region comprises a sequence selected from SEQ ID NOs: 16872-16884 and 16895.
[1208] 20. The immune cell of any one of embodiments 1 to 19, wherein the shRNA further comprises a 5′ flank sequence and a 3′ flank sequence, wherein the 5′ flank sequence is joined to the 5′ end of the first sequence, and wherein the 3′ flank sequence is joined to the 3′ end of the second sequence.
[1209] 21. The immune cell of embodiment 20, wherein the 5′ flank sequence is selected from SEQ ID NO: 16885-16887.
[1210] 22. The immune cell of embodiment 20 or 21, wherein the 3′ flank sequence is selected from SEQ ID NO: 16888, 16889, and 16896.
[1211] 23. The immune cell of any one of embodiments 1 to 22, wherein the shRNA is operably linked to a promoter.
[1212] 24. The immune cell of embodiment 23, wherein the promoter is selected from a U6 promoter, a wild-type H1 promoter, a wild-type 7SK promoter, an Ef1a promoter.
[1213] 25. The immune cell of embodiment 24, wherein the promoter sequence is selected from SEQ ID NOs: 16890-16893.
[1214] 26. The immune cell of any one of the preceding embodiments, wherein the immune cell is a T cell, B cell, or Natural Killer (NK) cell.
[1215] 27. The immune cell of any one of embodiments 1 to 26, wherein the immune cell is autologous to a subject.
[1216] 28. The immune cell of any one of embodiments 1 to 26, wherein the immune cell is allogeneic to a subject.
[1217] 29. The immune cell of any one of embodiments 1 to 26, wherein the immune cell is non-natural.
[1218] 30. The immune cell of any one of the preceding embodiments, wherein the immune cell is isolated.
[1219] 31. The immune cell of any one of the preceding embodiments, for use as a medicament.
[1220] 32. The immune cell of embodiment 31, wherein the medicament is for the treatment of cancer in a subject in need thereof
[1221] 33. A pharmaceutical composition, comprising a plurality of the immune cells of any one of embodiments 1-30.
[1222] 34. The pharmaceutical composition of embodiment 31, comprising a pharmaceutically acceptable carrier, diluent, or excipient.
[1223] 35. The pharmaceutical composition of embodiment 33 or 34, comprising a therapeutically effective amount of the immune cells.
[1224] 36. A method of treating cancer with an adoptive cell therapy, comprising administering to the subject a plurality of the immune cell of any one of embodiments 1-30 or the pharmaceutical composition of any one of embodiments 33-35.
[1225] 37. A vector comprising a promoter operably linked to the interfering RNA of any one of embodiments 1 to 25.
[1226] 38. A vector comprising an interfering RNA, comprising an shRNA that targets a HLA-A*02:01:01:01 mRNA sequence, wherein the shRNA comprises
   [1227] a. a first sequence, having from 5′ to 3′ a sequence complementary to the HLA-A*02:01:01:01 mRNA; and
   [1228] b. a second sequence, having from 5′ to 3′ end a sequence complementary to the first sequence, wherein the first sequence and the second sequence form the shRNA.
[1229] 39. The vector embodiment 38, wherein the HLA-A*02:01:01:01 mRNA sequence comprises a coding sequence.
[1230] 40. The vector of embodiment 38, wherein the HLA-A*02:01:01:01 mRNA sequence comprises an untranslated region.
[1231] 41. The vector of any one of embodiments 38 to 40, wherein the first sequence is 18, 19, 21, or 22 nucleotides.
[1232] 42. The vector of embodiment 41, wherein the first sequence is complementary to a sequence selected from SEQ ID NOs: 8476-16870.
[1233] 43. The vector of embodiment 41, wherein the first sequence has GC content greater than or equal to 25% and less than 60%.
[1234] 44. The vector of embodiment 41, wherein the first sequence is complementary to a sequence selected from SEQ ID NOs: 8476-12066.
[1235] 45. The vector of embodiment 43, wherein the first sequence does not comprise 4 nucleotides of the same base or a run of seven C or G bases.
[1236] 46. The vector of embodiment 43, wherein the first sequence is complementary to a sequence selected from SEQ ID NOs: 8476-11584.
[1237] 47. The vector of embodiment 45, wherein the first sequence is complementary to a sequence selected from SEQ ID NOs: 8476-8754 or 8476-8561.
[1238] 48. The vector of any one of embodiments 38 to 47, wherein the first sequence and second sequence are present on a single stranded polynucleotide, wherein the first sequence and second sequence are separated by 4, 5, 6, 7, 8, 9, 10, 11, 12, 13, 14, or nucleotides, wherein the 4, 5, 6, 7, 8, 9, 10, 11, 12, 13, 14, or 15 nucleotides form a loop region in the shRNA.
[1239] 49. The vector cell of embodiment 48, wherein the loop region comprises a sequence selected from SEQ ID NOs: 16872-16884 and 16895.
[1240] 50. The vector of any one of embodiments 38 to 49, wherein the shRNA further comprises a 5′ flank sequence and a 3′ flank sequence, wherein the 5′ flank sequence is joined to the 5′ end of the first sequence, and wherein the 3′ flank sequence is joined to the 3′ end of the second sequence.
[1241] 51. The vector of embodiment 50, wherein the 5′ flank sequence is selected from SEQ ID NO: 16885-16887.
[1242] 52. The vector of embodiment 50 or 51, wherein the 3′ flank sequence is selected from SEQ ID NO: 16888, 16889, and 16896.
[1243] 53. The vector of any one of embodiments 38 to 52, wherein the shRNA is operably linked to a promoter.
[1244] 54. The vector of embodiment 53, wherein the promoter is selected from a U6 promoter, a wild-type H1 promoter, a wild-type 7SK promoter, an Ef1a promoter.
[1245] 55. The vector of embodiment 54, wherein the promoter sequence is selected from SEQ ID NOs: 16890-16893.
[1246] 56. The vector of any one of embodiments 38 to 55, wherein the vector is a viral vector.
[1247] 57. The vector of embodiment 56, wherein the viral vector is a lentiviral vector.
[1248] 58. The vector of any one of embodiments 38 to 57, further comprising a polynucleotide encoding an inhibitory receptor comprising a ligand binding domain specific to a class I major histocompatibility complex (MHC-I) molecule, or a peptide-MHC complex thereof
[1249] 59. A method of producing an immune cell with reduced autocrine binding/signaling comprising transducing and/or transfecting the immune cell with the vector of any one of embodiments 38 to 58.
[1250] 60. The method of embodiment 59, comprising transducing the immune cell with a first vector comprising a sequence encoding an activator receptor and a second vector comprising a sequence encoding an inhibitory receptor, thereby producing an immune cell expressing the activator and inhibitory receptors.
[1251] 61. The method of embodiment 59, wherein, prior to the transducing and/or transfecting steps, the immune cell comprises a polynucleotide or vector encoding an interfering RNA targeting a HLA-A mRNA.
[1252] 62. The method of embodiments 60 or 61, wherein the inhibitory receptor specifically binds to an HLA-A*02 pMHC antigen and the target gene comprises HLA-A*02.
[1253] 63. A method of manufacturing a composition comprising immune cells with reduced autocrine binding/signaling comprising:
   [1254] a. providing immune cells from a subject suffering from or at risk for cancer or a hematological malignancy; and
   [1255] b. transducing and/or transfecting the immune cell with the vector of embodiments 38 to 58.
[1256] 64. The method of embodiment 63, wherein, prior to the transducing and/or transfecting steps, the immune cell comprises a polynucleotide encoding activator and/or inhibitory receptors.
[1257] 65. The method of 63, further comprising transducing the immune cell with a first vector comprising a sequence encoding the activator receptor and a second vector comprising a sequence encoding the inhibitory receptor, thereby producing an immune cell expressing the activator and inhibitory receptors.
[1258] 66. A method of treating a subject in need thereof comprising:
   [1259] a. providing immune cells from a subject suffering from or at risk for cancer or a hematological malignancy
   [1260] b. transducing the immune cell with the vector of embodiments 38 to 58; and
   [1261] c. administering the immune cell to the subject.

### Representative Embodiments—Set 5

[1262] 1. An immune cell comprising

[1263] an inhibitory receptor comprising a ligand binding domain specific to a class I major histocompatibility complex (MHC-I) molecule, or a peptide-MHC complex thereof;

[1264] wherein expression and/or function of beta-2-microglobulin (B2M) in said immune cell has been reduced or eliminated.
[1265] 2. The immune cell of embodiment 1, further comprising an interfering RNA, comprising a sequence complementary to a sequence of a B2M mRNA.
[1266] 3. The immune cell of embodiment 2, wherein the interfering RNA is capable of inducing RNAi-mediated degradation of the B2M mRNA.
[1267] 4. The immune cell of embodiment 3, wherein the interfering RNA is a short hairpin RNA (shRNA).
[1268] 5. The immune cell of embodiment 4, wherein the shRNA comprises
   [1269] a. a first sequence, having from 5′ end to 3′ end a sequence complementary to the B2M mRNA; and
   [1270] b. a second sequence, having from 5′ end to 3′ end a sequence complementary to the first sequence,

[1271] wherein the first sequence and the second sequence form the shRNA.
[1272] 6. The immune cell of embodiment 5, wherein the B2M mRNA sequence comprises a part of a coding sequence.
[1273] 7. The immune cell of embodiment 5, wherein the B2M mRNA sequence comprises a part of an untranslated region.
[1274] 8. The immune cell of any one of embodiments 1 to 7, wherein the first sequence is 18, 19, 20, 21, or 22 nucleotides.
[1275] 9. The immune cell of embodiment 8, wherein the first sequence is complementary to a sequence selected from SEQ ID NOs: 16897-21508, 847-8474, and 8368-8370.
[1276] 10. The immune cell of embodiment 8, wherein the first sequence has GC content greater than or equal to 25% and less than 60%.
[1277] 11. The immune cell of embodiment 10, wherein the first sequence is complementary to a sequence selected from SEQ ID NOs: 16897-20484.
[1278] 12. The immune cell of embodiment 10, wherein the first sequence does not comprise 4 nucleotides of the same base or a run of seven C or G bases.
[1279] 13. The immune cell of embodiment 12, wherein the first sequence is complementary to a sequence selected from SEQ ID NOs: 16897-19888.
[1280] 14. The immune cell of embodiment 12, wherein the first sequence is 21 nucleotides.
[1281] 15. The immune cell of embodiment 14, wherein the first sequence is complementary to a sequence selected from SEQ ID NOs: 16897-17478.
[1282] 16. The immune cell of embodiment 14, wherein the first sequence is selected from SEQ ID NOs: 16897-17178 or SEQ ID NOs: 16897-17034.
[1283] 17. The immune cell of any one of embodiments 5 to 16, wherein the first sequence and second sequence are present on a single stranded polynucleotide, wherein the first sequence and second sequence are separated by 4, 5, 6, 7, 8, 9, 10, 11, 12, 13, 14, or nucleotides, wherein the 4, 5, 6, 7, 8, 9, 10, 11, 12, 13, 14, or 15 nucleotides form a loop region in the shRNA.
[1284] 18. The immune cell of embodiment 17, wherein the loop region comprises a sequence selected from SEQ ID NOs: 16872-16884, and 16895.
[1285] 19. The immune cell of any one of embodiments 1 to 18, wherein the shRNA further comprises a 5′ flank sequence and a 3′ flank sequence, wherein the 5′ flank sequence is joined to the 5′ end of the first sequence, and wherein the 3′ flank sequence is joined to the 3′ end of the second sequence.
[1286] 20. The immune cell of embodiment 19, wherein the 5′ flank sequence is selected from SEQ ID NO: 16885-16887, and 16894.
[1287] 21. The immune cell of embodiment 19 or 20, wherein the 3′ flank sequence is selected from SEQ ID NO: 16888, 16889, and 16896.
[1288] 22. The immune cell of any one of embodiments 1 to 21, wherein the shRNA is operably linked to a promoter.
[1289] 23. The immune cell of embodiment 22, wherein the promoter is a mammalian promoter, viral promoter or synthetic promoter.
[1290] 24. The immune cell of embodiment 22, wherein the promoter is selected from a U6 promoter, a wild-type H1 promoter, a wild-type 7SK promoter, an Ef1a promoter.
[1291] 25. The immune cell of embodiment 24, wherein the promoter sequence is selected from SEQ ID NOs: 16890-16893.
[1292] 26. The immune cell of any one of the preceding embodiments, wherein the immune cell is a T cell, B cell, or Natural Killer (NK) cell.
[1293] 27. The immune cell of any one of embodiments 1 to 26, wherein the immune cell is autologous to a subject.
[1294] 28. The immune cell of any one of embodiments 1 to 26, wherein the immune cell is allogeneic to a subject.
[1295] 29. The immune cell of any one of embodiments 1 to 26, wherein the immune cell is non-natural.
[1296] 30. The immune cell of any one of the preceding embodiments, wherein the immune cell is isolated.
[1297] 31. The immune cell of any one of the preceding embodiments, for use as a medicament.
[1298] 32. The immune cell of embodiment 30, wherein the medicament is for the treatment of cancer in a subject in need thereof
[1299] 33. A pharmaceutical composition, comprising a plurality of the immune cells of any one of embodiments 1-32.
[1300] 34. The pharmaceutical composition of embodiment 33, comprising a pharmaceutically acceptable carrier, diluent, or excipient.
[1301] 35. The pharmaceutical composition of embodiment 33 or 34, comprising a therapeutically effective amount of the immune cells.
[1302] 36. A method of treating cancer with an adoptive cell therapy, comprising administering to the subject a plurality of the immune cell of any one of embodiments 1-32 or the pharmaceutical composition of any one of embodiments 33-35.
[1303] 37. A vector comprising the interfering RNA of any one of embodiments 1 to 25.
[1304] 38. A vector comprising an interfering RNA, wherein the interfering RNA comprises an shRNA that targets a B2M mRNA sequence, wherein the shRNA comprises
   [1305] a. a first sequence, having from 5′ to 3′ a sequence complementary to the B2M mRNA; and
   [1306] b. a second sequence, having from 5′ to 3′ end a sequence complementary to the first sequence,

[1307] wherein the first sequence and the second sequence form the shRNA.
[1308] 39. The vector of embodiment 38, wherein the B2M mRNA sequence comprises a coding sequence.
[1309] 40. The vector of embodiment 38, wherein the B2M mRNA sequence comprises an untranslated region.
[1310] 41. The vector of any one of embodiments 38-40, wherein the first sequence is 18, 19, 20, 21, or 22 nucleotides.
[1311] 42. The vector of embodiment 41, wherein the first sequence is complementary to a sequence selected from SEQ ID NOs: 16897-21508, 847-8474, and 8368-8370.
[1312] 43. The vector of embodiment 41, wherein the first sequence has GC content greater than or equal to 25% and less than 60%.
[1313] 44. The vector of embodiment 43, wherein the first sequence is complementary to a sequence selected from SEQ ID NOs: 16897-20484.
[1314] 45. The vector of embodiment 43, wherein the first sequence does not comprise 4 nucleotides of the same base or a run of seven C or G bases.
[1315] 46. The vector of embodiment 45, wherein the first sequence is complementary to a sequence selected from SEQ ID NOs: 16897-19888.
[1316] 47. The vector of embodiment 45, wherein the first sequence is 21 nucleotides.
[1317] 48. The vector of embodiment 47, wherein the first sequence is complementary to a sequence selected from SEQ ID NOs: 16897-17478.
[1318] 49. The vector of embodiment 47, wherein the first sequence is complementary to a sequence selected from SEQ ID NOs: 16897-17178 or 16897-17034.
[1319] 50. The vector of any one of embodiments 38-49, wherein the first sequence and second sequence are present on a single stranded polynucleotide, wherein the first sequence and second sequence are separated by 4, 5, 6, 7, 8, 9, 10, 11, 12, 13, 14, or 15 nucleotides, wherein the 4, 5, 6, 7, 8, 9, 10, 11, 12, 13, 14, or 15 nucleotides form a loop region in the shRNA.
[1320] 51. The vector of embodiment 50, wherein the loop region comprises a sequence selected from SEQ ID NOs: 16872-16884, and 16895.
[1321] 52. The vector of any one of embodiments 38-51, wherein the shRNA further comprises a flank sequence and a 3′ flank sequence, wherein the 5′ flank sequence is joined to the 5′ end of the first sequence, and wherein the 3′ flank sequence is joined to the 3′ end of the second sequence.
[1322] 53. The vector of embodiment 52, wherein the 5′ flank sequence is selected from SEQ ID NO: 16885-16887, and 16894.
[1323] 54. The vector of embodiment 52 or 53, wherein the 3′ flank sequence is selected from SEQ ID NO: 16888, 16889, and 16896.
[1324] 55. The vector of any one of embodiments 38-54, wherein the shRNA is operably linked to a promoter.
[1325] 56. The vector of embodiment 55, wherein the promoter is a mammalian promoter, viral promoter or synthetic promoter.
[1326] 57. The vector of embodiment 55, wherein the promoter is selected from a U6 promoter, a wild-type H1 promoter, a wild-type 7SK promoter, an Ef1a promoter.
[1327] 58. The vector of embodiment 55, wherein the promoter sequence is selected from SEQ ID NOs: 16890-16893.
[1328] 59. The vector of any one of embodiments 38-58, wherein the vector is a viral vector.
[1329] 60. The vector of embodiment 59, wherein the viral vector is a lentiviral vector.
[1330] 61. The vector of any one of embodiments 38-60, further comprising a polynucleotide encoding an inhibitory receptor comprising a ligand binding domain specific to a class I major histocompatibility complex (MHC-I) molecule, or a peptide-MHC complex thereof
[1331] 62. A method of producing an immune cell with reduced autocrine binding/signaling comprising transducing and/or transfecting the immune cell with the vector of any one of embodiments 38-61.
[1332] 63. The method of embodiment 62, comprising transducing the immune cell with a first vector comprising a sequence encoding an activator receptor and a second vector comprising a sequence encoding an inhibitory receptor, thereby producing an immune cell expressing the activator and inhibitory receptors.
[1333] 64. The method of embodiment 62, wherein, prior to the transducing and/or transfecting steps, the immune cell comprises a polynucleotide or vector encoding an interfering RNA targeting a B2M mRNA.
[1334] 65. The method of embodiments 63 or 64, wherein the inhibitory receptor specifically binds to an HLA-A*02 pMHC antigen and the target gene comprises HLA-A*02.
[1335] 66. A method of manufacturing a composition comprising immune cells with reduced autocrine binding/signaling comprising:
   [1336] a. providing immune cells from a subject suffering from or at risk for cancer or a hematological malignancy; and
   [1337] b. transducing and/or transfecting the immune cell with the vector of embodiments 38-61.
[1338] 67. The method of embodiment 66, wherein, prior to the transducing and/or transfecting steps, the immune cell comprises a polynucleotide encoding activator and/or inhibitory receptors.
[1339] 68. The method of 66, further comprising transducing the immune cell with a first vector comprising a sequence encoding the activator receptor and a second vector comprising a sequence encoding the inhibitory receptor, thereby producing an immune cell expressing the activator and inhibitory receptors.
[1340] 69. A method of treating a subject in need thereof comprising:
   [1341] a. providing immune cells from a subject suffering from or at risk for cancer or a hematological malignancy;
   [1342] b. transducing the immune cell with the vector of embodiments 38-61; and
   [1343] c. administering the immune cell to the subject.

The application's sequence listing, which the Patent Office published only in electronic form, follows.

SEQUENCE LISTING (21905 sequences)

SEQ ID NO: 1 - protein, 45 aa, Artificial Sequence
  CD8alpha hinge
TTTPAPRPPTPAPTIASQPLSLRPEACRPAAGGAVHTRGLDFACD

SEQ ID NO: 2 - DNA, 135 bp, Artificial Sequence
  CD8alpha hinge
accacgacgccagcgccgcgaccaccaacaccggcgcccaccatcgcgtcgcagcccctgtccctgcgcccagaggcgtgccggccagcggcggggggcgcagtgcacacgagggggctggacttcgcctgtgat

SEQ ID NO: 3 - protein, 41 aa, Artificial Sequence
  CD28 hinge
CTIEVMYPPPYLDNEKSNGTIIHVKGKHLCPSPLFPGPSKP

SEQ ID NO: 4 - DNA, 123 bp, Artificial Sequence
  CD28 hinge
tgtaccattgaagttatgtatcctcctccttacctagacaatgagaagagcaatggaaccattatccatgtgaaagggaaacacctttgtccaagtcccctatttcccggaccttctaagccc

SEQ ID NO: 5 - protein, 27 aa, Artificial Sequence
  CD28 transmembrane domain
FWVLVVVGGVLACYSLLVTVAFIIFWV

SEQ ID NO: 6 - DNA, 81 bp, Artificial Sequence
  CD28 transmembrane domain
ttctgggtgctggtcgttgtgggcggcgtgctggcctgctacagcctgctggtgacagtggccttcatcatcttttgggtg

SEQ ID NO: 7 - protein, 25 aa, Artificial Sequence
  IL-2Rbeta transmembrane domain
IPWLGHLLVGLSGAFGFIILVYLLI

SEQ ID NO: 8 - DNA, 75 bp, Artificial Sequence
  IL-2Rbeta transmembrane domain
attccgtggctcggccacctcctcgtgggcctcagcggggcttttggcttcatcatcttagtgtacttgctgatc

SEQ ID NO: 9 - protein, 112 aa, Artificial Sequence
  the CD3zeta activation domain
RVKFSRSADAPAYKQGQNQLYNELNLGRREEYDVLDKRRGRDPEMGGKPRRKNPQEGLYNELQKDKMAEAYSEIGMKGERRRGKGHDGLYQGLSTATKDTYDALHMQALPPR

SEQ ID NO: 10 - DNA, 336 bp, Artificial Sequence
  CD3zeta activation domain
agagtgaagttcagcaggagcgcagacgcccccgcgtacaagcagggccagaaccagctctataacgagctcaatctaggacgaagagaggagtacgatgttttggacaagcgtagaggccgggaccctgagatggggggaaagccgagaaggaagaaccctcaggaaggcctgtacaatgaactgcagaaagataagatggcggaggcctacagtgagattgggatgaaaggcgagcgccggaggggcaaggggcacgatggcctttaccagggactcagtacagccaccaaggacacctacgacgcccttcacatgcaggccctgccccctcgc

SEQ ID NO: 11 - protein, 43 aa, Artificial Sequence
  ITAM Domain
RVKFSRSADAPAYQQGQNQLYNELNLGRREEYDVLHMQALPPR

SEQ ID NO: 12 - DNA, 129 bp, Artificial Sequence
  ITAM Domain
agagtgaagttcagcaggagcgcagacgcccccgcgtaccagcagggccagaaccagctctataacgagctcaatctaggacgaagagaggagtacgatgttttgcacatgcaggccctgccccctcgc

SEQ ID NO: 13 - protein, 41 aa, Artificial Sequence
  CD28 co-stimulatory domain
RSKRSRLLHSDYMNMTPRRPGPTRKHYQPYAPPRDFAAYRS

SEQ ID NO: 14 - DNA, 123 bp, Artificial Sequence
  CD28 co-stimulatory domain
aggagcaagcggagcagactgctgcacagcgactacatgaacatgaccccccggaggcctggccccacccggaagcactaccagccctacgcccctcccagggatttcgccgcctaccggagc

SEQ ID NO: 15 - protein, 94 aa, Artificial Sequence
  IL-2-Rbeta intracellular domain
NCRNTGPWLKKVLKCNTPDPSKFFSQLSSEHGGDVQKWLSSPFPSSSFSPGGLAPEISPLEVLERDKVTQLLPLNTDAYLSLQELQGQDPTHLV

SEQ ID NO: 16 - DNA, 282 bp, Artificial Sequence
  IL-2-Rbeta intracellular domain
aactgcaggaacaccgggccatggctgaagaaggtcctgaagtgtaacaccccagacccctcgaagttcttttcccagctgagctcagagcatggaggcgacgtccagaagtggctctcttcgcccttcccctcatcgtccttcagccctggcggcctggcacctgagatctcgccactagaagtgctggagagggacaaggtgacgcagctgctccccctgaacactgatgcctacttgtctctccaagaactccagggtcaggacccaactcacttggtg

SEQ ID NO: 17 - protein, 4 aa, Artificial Sequence
  STAT5 recruitment motif
YLSL

SEQ ID NO: 18 - protein, 760 aa, Artificial Sequence
  transferin receptor coding sequence
MMDQARSAFSNLFGGEPLSYTRFSLARQVDGDNSHVEMKLAVDEEENADNNTKANVTKPKRCSGSICYGTIAVIVFFLIGFMIGYLGYCKGVEPKTECERLAGTESPVREEPGEDFPAARRLYWDDLKRKLSEKLDSTDFTSTIKLLNENSYVPREAGSQKDENLALYVENQFREFKLSKVWRDQHFVKIQVKDSAQNSVIIVDKNGRLVYLVENPGGYVAYSKAATVTGKLVHANFGTKKDFEDLYTPVNGSIVIVRAGKITFAEKVANAESLNAIGVLIYMDQTKFPIVNAELSFFGHAHLGTGDPYTPGFPSFNHTQFPPSRSSGLPNIPVQTISRAAAEKLFGNMEGDCPSDWKTDSTCRMVTSESKNVKLTVSNVLKEIKILNIFGVIKGFVEPDHYVVVGAQRDAWGPGAAKSGVGTALLLKLAQMFSDMVLKDGFQPSRSIIFASWSAGDFGSVGATEWLEGYLSSLHLKAFTYINLDKAVLGTSNFKVSASPLLYTLIEKTMQNVKHPVTGQFLYQDSNWASKVEKLTLDNAAFPFLAYSGIPAVSFCFCEDTDYPYLGTTMDTYKELIERIPELNKVARAAAEVAGQFVIKLTHDVELNLDYERYNSQLLSFVRDLNQYRADIKEMGLSLQWLYSARGDFFRATSRLTTDFGNAEKTDRFVMKKLNDRVMRVEYHFLSPYVSPKESPFRHVFWGSGSHTLPALLENLKLRKQNNGAFNETLFRNQLALATWTIQGAANALSGDVWDIDNEF

SEQ ID NO: 19 - DNA, 300 bp, Artificial Sequence
  CD3 epsilon intracellular domain
aagaatagaaaggccaaggccaagcctgtgacacgaggagcgggtgctggcggcaggcaaaggggacaaaacaaggagaggccaccacctgttcccaacccagactatgagcccatccggaaaggccagcgggacctgtattctggcctgaatcagcgcagaatcggcggaagcaggagcaagcggagcagactgctgcacagcgactacatgaacatgaccccccggaggcctggccccacccggaagcactaccagccctacgcccctcccagggatttcgccgcctaccggagctag

SEQ ID NO: 20 - DNA, 69 bp, Artificial Sequence
  TCR beta transmembrane domain
accatcctctatgagatcttgctagggaaggccaccttgtatgccgtgctggtcagtgccctcgtgctg

SEQ ID NO: 21 - protein, 4 aa, Artificial Sequence
  ITAM motif
  SITE (2)..(3): Xaa is any amino acid
YXXL

SEQ ID NO: 22 - DNA, 270 bp, Artificial Sequence
  CD3 gamma intracellular domain
ggacaggatggagttcgccagtcgagagcttcagacaagcagactctgttgcccaatgaccagctctaccagcccctcaaggatcgagaagatgaccagtacagccaccttcaaggaaaccagttgaggaggaatggcggaagcaggagcaagcggagcagactgctgcacagcgactacatgaacatgaccccccggaggcctggccccacccggaagcactaccagccctacgcccctcccagggatttcgccgcctaccggagctag

SEQ ID NO: 23 - protein, 10 aa, Artificial Sequence
  UTY Peptide
  SITE (1)..(1): Xaa is Arg or Gly
  SITE (6)..(6): Xaa is Glu or Ala
  SITE (8)..(8): Xaa is Val or Pro
XESEEXSXSL

SEQ ID NO: 24 - protein, 9 aa, Artificial Sequence
  RPS4Y Peptide
  SITE (8)..(8): Xaa is Val or Leu
TIRYPDPXI

SEQ ID NO: 25 - protein, 8 aa, Artificial Sequence
  UTY Peptide
  SITE (5)..(5): Xaa is His or Arg
  SITE (7)..(7): Xaa is Asp or Asn
LPHNXTXL

SEQ ID NO: 26 - protein, 23 aa, Artificial Sequence
  TCR alpha transmembrane domain
VIGFRILLLKVAGFNLLMTLRLW

SEQ ID NO: 27 - DNA, 69 bp, Artificial Sequence
  TCR alpha transmembrane domain
gtgattgggttccgaatcctcctcctgaaagtggccgggtttaatctgctcatgacgctgcggctgtgg

SEQ ID NO: 28 - protein, 23 aa, Artificial Sequence
  TCR beta transmembrane domain
TILYEILLGKATLYAVLVSALVL

SEQ ID NO: 29 - protein, 21 aa, Artificial Sequence
  CD3 zeta transmembrane domain
LCYLLDGILFIYGVILTALFL

SEQ ID NO: 30 - protein, 89 aa, Artificial Sequence
  CD3 delta intracellular domain
GHETGRLSGAADTQALLRNDQVYQPLRDRDDAQYSHLGGNWARNKGGSRSKRSRLLHSDYMNMTPRRPGPTRKHYQPYAPPRDFAAYRS

SEQ ID NO: 31 - DNA, 269 bp, Artificial Sequence
  CD3 delta intracellular domain
ggacatgagactggaaggctgtctggggctgccgacacacaagctctgttgaggaatgaccaggtctatcagcccctccgagatcgagatgatgctcagtacagccaccttggaggaaactgggctcggaacaagggcggaagcaggagcaagcggagcagactgctgcacagcgactacatgaacatgaccccccggaggcctggccccacccggaagcactaccagccctacgcccctcccagggatttcgccgcctaccggagcta

SEQ ID NO: 32 - protein, 99 aa, Artificial Sequence
  CD3 epsilon intracellular domain
KNRKAKAKPVTRGAGAGGRQRGQNKERPPPVPNPDYEPIRKGQRDLYSGLNQRRIGGSRSKRSRLLHSDYMNMTPRRPGPTRKHYQPYAPPRDFAAYRS

SEQ ID NO: 33 - protein, 89 aa, Artificial Sequence
  CD3 gamma intracellular domain
GQDGVRQSRASDKQTLLPNDQLYQPLKDREDDQYSHLQGNQLRRNGGSRSKRSRLLHSDYMNMTPRRPGPTRKHYQPYAPPRDFAAYRS

SEQ ID NO: 34 - protein, 11 aa, Artificial Sequence
  SMCY peptide
  SITE (3)..(3): Xaa is Ser or Ala
  SITE (8)..(8): Xaa is Arg or Gln
SPXVDKAXAEL

SEQ ID NO: 35 - protein, 10 aa, Artificial Sequence
  TCR beta intracellular domain
MAMVKRKDSR

SEQ ID NO: 36 - DNA, 30 bp, Artificial Sequence
  TCR beta intracellular domain
atggccatggtcaagagaaaggattccaga

SEQ ID NO: 37 - protein, 42 aa, Artificial Sequence
  4-1BB intracellular domain
KRGRKKLLYIFKQPFMRPVQTTQEEDGCSCRFPEEEEGGCEL

SEQ ID NO: 38 - DNA, 126 bp, Artificial Sequence
  4-1BB intracellular domain
aaacggggcagaaagaaactcctgtatatattcaaacaaccatttatgaggccagtacaaactactcaagaggaagatggctgtagctgccgatttccagaagaagaagaaggaggatgtgaactg

SEQ ID NO: 39 - protein, 16 aa, Artificial Sequence
  HLA-A02 Binder LCDR1
RSSQSIVHSNGNTYLE

SEQ ID NO: 40 - protein, 12 aa, Artificial Sequence
  HLA-A02 Binder LCDR2
KVSNRFSGVPDR

SEQ ID NO: 41 - protein, 9 aa, Artificial Sequence
  HLA-A02 Binder LCDR3
FQGSHVPRT

SEQ ID NO: 42 - protein, 12 aa, Artificial Sequence
  HLA-A02 Binder HCDR1
ASGYTFTSYHIH

SEQ ID NO: 43 - protein, 18 aa, Artificial Sequence
  HLA-A02 Binder HCDR2
WIYPGNVNTEYNEKFKGK

SEQ ID NO: 44 - protein, 9 aa, Artificial Sequence
  HLA-A02 Binder HCDR3
EEITYAMDY

SEQ ID NO: 45 - protein, 16 aa, Artificial Sequence
  HLA-A02 Binder LCDR1
RSSQSIVHSNGNTYLD

SEQ ID NO: 46 - protein, 9 aa, Artificial Sequence
  HLA-A02 Binder LCDR3
MQGSHVPRT

SEQ ID NO: 47 - protein, 11 aa, Artificial Sequence
  HLA-A02 Binder HCDR1
SGYTFTSYHMH

SEQ ID NO: 48 - protein, 17 aa, Artificial Sequence
  HLA-A02 Binder HCDR2
WIYPGDGSTQYNEKFKG

SEQ ID NO: 49 - protein, 9 aa, Artificial Sequence
  HLA-A02 Binder HCDR3
EGTYYAMDY

SEQ ID NO: 50 - protein, 247 aa, Artificial Sequence
  C-001765 PA2.1 scFv (mouse)
DVLMTQTPLSLPVSLGDQASISCRSSQSIVHSNGNTYLEWYLQKPGQSPKLLIYKVSNRFSGVPDRFSGSGSGTDFTLKISRVEAEDLGVYYCFQGSHVPRTSGGGTKLEIKGGGGSGGGGSGGGGSGGQVQLQQSGPELVKPGASVRISCKASGYTFTSYHIHWVKQRPGQGLEWIGWIYPGNVNTEYNEKFKGKATLTADKSSSTAYMHLSSLTSEDSAVYFCAREEITYAMDYWGQGTSVTVSS

SEQ ID NO: 51 - protein, 247 aa, Artificial Sequence
  C-002159 PA2.1.8 scFv (humanized)
QVQLVQSGAEVKKPGSSVKVSCKASGYTFTSYHIHWVRQAPGQGLEWMGWIYPGNVNTEYNEKFKGKATITADKSTSTAYMELSSLRSEDTAVYYCAREEITYAMDYWGQGTTVTVSSGGGGSGGGGSGGGGSGGEIVLTQSPGTLSLSPGERATLSCRSSQSIVHSNGNTYLEWYQQKPGQAPRLLIYKVSNRFSGIPDRFSGSGSGTDFTLTISRLEPEDFAVYYCFQGSHVPRTFGGGTKVEIK

SEQ ID NO: 52 - protein, 247 aa, Artificial Sequence
  C-002160 PA2.1.9 scFv (humanized)
QVQLVQSGAEVKKPGSSVKVSCKASGYTFTSYHIHWVRQAPGQGLEWMGWIYPGNVNTEYNEKFKGKATITADKSTSTAYMELSSLRSEDTAVYYCAREEITYAMDYWGQGTTVTVSSGGGGSGGGGSGGGGSGGDIVMTQTPLSLPVTPGEPASISCRSSQSIVHSNGNTYLEWYLQKPGQSPQLLIYKVSNRFSGVPDRFSGSGSGTDFTLKISRVEAEDVGVYYCFQGSHVPRTFGGGTKVEIK

SEQ ID NO: 53 - protein, 247 aa, Artificial Sequence
  C-002161 PA2.1.10 scFv (humanized)
EVQLVESGGGLVKPGGSLRLSCAASGYTFTSYHIHWVRQAPGKGLEWVGWIYPGNVNTEYNEKFKGRFTISRDDSKNTLYLQMNSLKTEDTAVYYCAREEITYAMDYWGQGTTVTVSSGGGGSGGGGSGGGGSGGDIQMTQSPSSLSASVGDRVTITCRSSQSIVHSNGNTYLEWYQQKPGKAPKLLIYKVSNRFSGVPSRFSGSGSGTDFTLTISSLQPEDFATYYCFQGSHVPRTFGGGTKVEIK

SEQ ID NO: 54 - protein, 247 aa, Artificial Sequence
  C-002162 PA2.1.14 scFv (humanized)
QVQLVQSGAEVKKPGSSVKVSCKASGYTFTSYHIHWVRQAPGQGLEWIGWIYPGNVNTEYNEKFKGKATITADESTNTAYMELSSLRSEDTAVYYCAREEITYAMDYWGQGTLVTVSSGGGGSGGGGSGGGGSGGDIQMTQSPSTLSASVGDRVTITCRSSQSIVHSNGNTYLEWYQQKPGKAPKLLIYKVSNRFSGVPARFSGSGSGTEFTLTISSLQPDDFATYYCFQGSHVPRTFGQGTKVEVK

SEQ ID NO: 55 - protein, 247 aa, Artificial Sequence
  C-002163 PA2.1.18 scFv (humanized)
QVQLVQSGAEVKKPGSSVKVSCKASGYTFTSYHMHWVRQAPGQGLEWIGYIYPGNVNTEYNEKFKGKATLTADKSTNTAYMELSSLRSEDTAVYFCAREEITYAMDYWGQGTLVTVSSGGGGSGGGGSGGGGSGGDVQMTQSPSTLSASVGDRVTITCSSSQSIVHSNGNTYMEWYQQKPGKAPKLLIYKVSNRFSGVPDRFSGSGSGTEFTLTISSLQPDDFATYYCHQGSHVPRTFGQGTKVEVK

SEQ ID NO: 56 - protein, 247 aa, Artificial Sequence
  C-002164 BB7.2 scFv (mouse)
QVQLQQSGPELVKPGASVKMSCKASGYTFTSYHIQWVKQRPGQGLEWIGWIYPGDGSTQYNEKFKGKTTLTADKSSSTAYMLLSSLTSEDSAIYFCAREGTYYAMDYWGQGTSVTVSSGGGGSGGGGSGGGGSGGDVLMTQTPLSLPVSLGDQVSISCRSSQSIVHSNGNTYLEWYLQKPGQSPKLLIYKVSNRFSGVPDRFSGSGSGTDFTLKISRVEAEDLGVYYCFQGSHVPRTFGGGTKLEIK

SEQ ID NO: 57 - protein, 247 aa, Artificial Sequence
  C-002165 BB7.2.1 scFv (humanized)
QLQLQESGPGLVKPSETLSLTCTVSGYTFTSYHIQWIRQPPGKGLEWIGWIYPGDGSTQYNEKFKGRATISVDTSKNQFSLNLDSVSAADTAIYYCAREGTYYAMDYWGKGSTVTVSSGGGGSGGGGSGGGGSGGDIQMTQSPSSLSASVGDRVTITCRSSQSIVHSNGNTYLEWYQQKPGKAPKLLIYKVSNRFSGVPSRFSGSGSGTDFTFTISSLQPEDIATYYCFQGSHVPRTFGPGTKVDIK

SEQ ID NO: 58 - protein, 247 aa, Artificial Sequence
  C-002166 BB7.2.2 scFv (humanized)
EVQLVQSGAELKKPGSSVKVSCKASGYTFTSYHIQWVKQAPGQGLEWIGWIYPGDGSTQYNEKFKGKATLTVDKSTNTAYMELSSLRSEDTAVYYCAREGTYYAMDYWGQGTLVTVSSGGGGSGGGGSGGGGSGGDIQMTQSPSTLSASVGDRVTITCRSSQSIVHSNGNTYLEWYQQKPGKAPKLLIYKVSNRFSGVPSRFSGSGSGTDFTLTISSLQPDDFATYYCFQGSHVPRTFGQGTKVEVK

SEQ ID NO: 59 - protein, 247 aa, Artificial Sequence
  C-002167 BB7.2.3 scFv (humanized)
QVQLVQSGAEVKKPGSSVKVSCKASGYTFTSYHIQWVRQAPGQGLEWMGWIYPGDGSTQYNEKFKGRVTITADKSTSTAYMELSSLRSEDTAVYYCAREGTYYAMDYWGQGTTVTVSSGGGGSGGGGSGGGGSGGEIVLTQSPGTLSLSPGERATLSCRSSQSIVHSNGNTYLEWYQQKPGQAPRLLIYKVSNRFSGIPDRFSGSGSGTDFTLTISRLEPEDFAVYYCFQGSHVPRTFGGGTKVEIK

SEQ ID NO: 60 - protein, 247 aa, Artificial Sequence
  C-002168 BB7.2.5 scFv (humanized)
QVTLKQSGAEVKKPGSSVKVSCTASGYTFTSYHVSWVRQAPGQGLEWLGRIYPGDGSTQYNEKFKGKVTITADKSMDTSFMELTSLTSEDTAVYYCAREGTYYAMDLWGQGTLVTVSSGGGGSGGGGSGGGGSGGEIVLTQSPGTLSLSPGERATLSCRSSQSIVHSNGNTYLAWYQQKPGQAPRLLISKVSNRFSGVPDRFSGSGSGTDFTLTISRLEPEDFAVYYCQQGSHVPRTFGGGTKVEIK

SEQ ID NO: 61 - protein, 247 aa, Artificial Sequence
  C-002169 BB7.2.6 scFv (humanized)
QVQLVQSGAEVKKPGASVKVSCKASGYTFTSYHMHWVRQAPGQRLEWMGWIYPGDGSTQYNEKFKGKVTITRDTSASTAYMELSSLRSEDTAVYYCAREGTYYAMDYWGQGTLVTVSSGGGGSGGGGSGGGGSGGDIVMTQTPLSLPVTPGEPASISCRSSQSIVHSNGNTYLDWYLQKPGQSPQLLIYKVSNRFSGVPDRFSGSGSGTDFTLKISRVEAEDVGVYYCMQGSHVPRTFGGGTKVEIK

SEQ ID NO: 62 - protein, 670 aa, Artificial Sequence
  LILRB1 Domain(s)
MTPILTVLICLGLSLGPRTHVQAGHLPKPTLWAEPGSVITQGSPVTLRCQGGQETQEYRLYREKKTALWITRIPQELVKKGQFPIPSITWEHAGRYRCYYGSDTAGRSESSDPLELVVTGAYIKPTLSAQPSPVVNSGGNVILQCDSQVAFDGFSLCKEGEDEHPQCLNSQPHARGSSRAIFSVGPVSPSRRWWYRCYAYDSNSPYEWSLPSDLLELLVLGVSKKPSLSVQPGPIVAPEETLTLQCGSDAGYNRFVLYKDGERDFLQLAGAQPQAGLSQANFTLGPVSRSYGGQYRCYGAHNLSSEWSAPSDPLDILIAGQFYDRVSLSVQPGPTVASGENVTLLCQSQGWMQTFLLTKEGAADDPWRLRSTYQSQKYQAEFPMGPVTSAHAGTYRCYGSQSSKPYLLTHPSDPLELVVSGPSGGPSSPTTGPTSTSGPEDQPLTPTGSDPQSGLGRHLGVVIGILVAVILLLLLLLLLFLILRHRRQGKHWTSTQRKADFQHPAGAVGPEPTDRGLQWRSSPAADAQEENLYAAVKHTQPEDGVEMDTRSPHDEDPQAVTYAEVKHSRPRREMASPPSPLSGEFLDTKDRQAEEDRQMDTEAAASEAPQDVTYAQLHSLTLRREATEPPPSQEGPSPAVPSIYATLAIHPSQEGPSPAVPSIYATLAIH

SEQ ID NO: 63 - DNA, 3229 bp, Artificial Sequence
  LILRB1 Domain(s)
aaatgagttttaaaaaggcttgtccaggaagcacatatgggagctggtcactctgcattttgggccctcctggaggtgtttagaccttccgagagagaaactgagacacatgagagggaagaaatgactcagtggtgagaccctgtggagtcccacccacaaccagcacactgtgacccactgcacaaacctctagcccacagctcacttcctcctttaagaagagaagagaaaagaggagaggagaggaggaacagaaaagaaaagaaaagaaaaagtgggaaacaaataatctaagaatgaggagaaagcaagaagagtgacccccttgtgggcactccattggttttatggcgcctctactttctggagtttgtgtaaaacaaaaatattatggtctttgtgcacatttacatcaagctcagcctgggcggcacagccagatgcgagatgcgtctctgctgatctgagtctgcctgcagcatggacctgggtcttccctgaagcatctccagggctggagggacgactgccatgcaccgagggctcatccatccacagagcagggcagtgggaggagacgccatgacccccatcctcacggtcctgatctgtctcgggctgagtctgggcccccggacccacgtgcaggcagggcacctccccaagcccaccctctgggctgaaccaggctctgtgatcacccaggggagtcctgtgaccctcaggtgtcaggggggccaggagacccaggagtaccgtctatatagagaaaagaaaacagcaccctggattacacggatcccacaggagcttgtgaagaagggccagttccccatcccatccatcacctgggaacacacagggcggtatcgctgttactatggtagcgacactgcaggccgctcagagagcagtgaccccctggagctggtggtgacaggagcctacatcaaacccaccctctcagcccagcccagccccgtggtgaactcaggagggaatgtaaccctccagtgtgactcacaggtggcatttgatggcttcattctgtgtaaggaaggagaagatgaacacccacaatgcctgaactcccagccccatgcccgtgggtcgtcccgcgccatcttctccgtgggccccgtgagcccgagtcgcaggtggtggtacaggtgctatgcttatgactcgaactctccctatgagtggtctctacccagtgatctcctggagctcctggtcctaggtgtttctaagaagccatcactctcagtgcagccaggtcctatcgtggcccctgaggagaccctgactctgcagtgtggctctgatgctggctacaacagatttgttctgtataaggacggggaacgtgacttccttcagctcgctggcgcacagccccaggctgggctctcccaggccaacttcaccctgggccctgtgagccgctcctacgggggccagtacagatgctacggtgcacacaacctctcctccgagtggtcggcccccagcgaccccctggacatcctgatcgcaggacagttctatgacagagtctccctctcggtgcagccgggccccacggtggcctcaggagagaacgtgaccctgctgtgtcagtcacagggatggatgcaaactttccttctgaccaaggagggggcagctgatgacccatggcgtctaagatcaacgtaccaatctcaaaaataccaggctgaattccccatgggtcctgtgacctcagcccatgcggggacctacaggtgctacggctcacagagctccaaaccctacctgctgactcaccccagtgaccccctggagctcgtggtctcaggaccgtctgggggccccagctccccgacaacaggccccacctccacatctggccctgaggaccagcccctcacccccaccgggtcggatccccagagtggtctgggaaggcacctgggggttgtgatcggcatcttggtggccgtcatcctactgctcctcctcctcctcctcctcttcctcatcctccgacatcgacgtcagggcaaacactggacatcgacccagagaaaggctgatttccaacatcctgcaggggctgtggggccagagcccacagacagaggcctgcagtggaggtccagcccagctgccgatgcccaggaagaaaacctctatgctgccgtgaagcacacacagcctgaggatggggtggagatggacactcggagcccacacgatgaagacccccaggcagtgacgtatgccgaggtgaaacactccagacctaggagagaaatggcctctcctccttccccactgtctggggaattcctggacacaaaggacagacaggcggaagaggacaggcagatggacactgaggctgctgcatctgaagccccccaggatgtgacctacgcccagctgcacagcttgaccctcagacgggaggcaactgagcctcctccatcccaggaagggccctctccagctgtgcccagcatctacgccactctggccatccactagcccagggggggacgcagaccccacactccatggagtctggaatgcatgggagctgcccccccagtggacaccattggaccccacccagcctggatctaccccaggagactctgggaacttttaggggtcactcaattctgcagtataaataactaatgtctctacaattttgaaataaagcaacagacttctcaataatcaatgaagtagctgagaaaactaagtcagaaagtgcattaaactgaatcacaatgtaaatattacacatcaagcgatgaaactggaaaactacaagccacgaatgaatgaattaggaaagaaaaaaagtaggaaatgaatgatcttggctttcctataagaaatttagggcagggcacggtggctcacgcctgtaattccagcactttgggaggccgaggcgggcagatcacgagttcaggagatcgagaccatcttggccaacatggtgaaaccctgtctctcctaaaaatacaaaaattagctggatgtggtggcagtgcctgtaatcccagctatttgggaggctgaggcaggagaatcgcttgaaccagggagtcagaggtttcagtgagccaagatcgcaccactgctctccagcctggcgacagagggagactccatctcaaattaaaaaaaaaaaaaaaaaagaaagaaaaaaaaaaaaaaaaaa

SEQ ID NO: 64 - protein, 6 aa, Artificial Sequence
  ITIM1
NLYAAV

SEQ ID NO: 65 - protein, 6 aa, Artificial Sequence
  ITIM2
VTYAEV

SEQ ID NO: 66 - protein, 6 aa, Artificial Sequence
  ITIM3
VTYAQL

SEQ ID NO: 67 - protein, 6 aa, Artificial Sequence
  ITIM4
SIYATL

SEQ ID NO: 68 - protein, 35 aa, Artificial Sequence
  ITIM1-2
NLYAAVKHTQPEDGVEMDTRSPHDEDPQAVTYAEV

SEQ ID NO: 69 - protein, 58 aa, Artificial Sequence
  ITIM2-3
VTYAEVKHSRPRREMASPPSPLSGEFLDTKDRQAEEDRQMDTEAAASEAPQDVTYAQL

SEQ ID NO: 70 - protein, 36 aa, Artificial Sequence
  ITIM3-4
VTYAQLHSLTLRREATEPPPSQEGPSPAVPSIYATL

SEQ ID NO: 71 - protein, 87 aa, Artificial Sequence
  ITIM1-3
NLYAAVKHTQPEDGVEMDTRSPHDEDPQAVTYAEVKHSRPRREMASPPSPLSGEFLDTKDRQAEEDRQMDTEAAASEAPQDVTYAQL

SEQ ID NO: 72 - protein, 88 aa, Artificial Sequence
  ITIM2-4
VTYAEVKHSRPRREMASPPSPLSGEFLDTKDRQAEEDRQMDTEAAASEAPQDVTYAQLHSLTLRREATEPPPSQEGPSPAVPSIYATL

SEQ ID NO: 73 - protein, 117 aa, Artificial Sequence
  ITIM1-4
NLYAAVKHTQPEDGVEMDTRSPHDEDPQAVTYAEVKHSRPRREMASPPSPLSGEFLDTKDRQAEEDRQMDTEAAASEAPQDVTYAQLHSLTLRREATEPPPSQEGPSPAVPSIYATL

SEQ ID NO: 74 - protein, 20 aa, Artificial Sequence
  LILRB1 D3D4 domain
YGSQSSKPYLLTHPSDPLEL

SEQ ID NO: 75 - protein, 43 aa, Artificial Sequence
  Short Hinge
VVSGPSGGPSSPTTGPTSTSGPEDQPLTPTGSDPQSGLGRHLG

SEQ ID NO: 76 - protein, 86 aa, Artificial Sequence
  Hinge-transmembrane
YGSQSSKPYLLTHPSDPLELVVSGPSGGPSSPTTGPTSTSGPEDQPLTPTGSDPQSGLGRHLGVVIGILVAVILLLLLLLLLFLIL

SEQ ID NO: 77 - protein, 190 aa, Artificial Sequence
  Transmembrane-intracellular domain
VVIGILVAVILLLLLLLLLFLILRHRRQGKHWTSTQRKADFQHPAGAVGPEPTDRGLQWRSSPAADAQEENLYAAVKHTQPEDGVEMDTRSPHDEDPQAVTYAEVKHSRPRREMASPPSPLSGEFLDTKDRQAEEDRQMDTEAAASEAPQDVTYAQLHSLTLRREATEPPPSQEGPSPAVPSIYATLAIH

SEQ ID NO: 78 - protein, 167 aa, Artificial Sequence
  LILRB1 intracellular domain
RHRRQGKHWTSTQRKADFQHPAGAVGPEPTDRGLQWRSSPAADAQEENLYAAVKHTQPEDGVEMDTRSPHDEDPQAVTYAEVKHSRPRREMASPPSPLSGEFLDTKDRQAEEDRQMDTEAAASEAPQDVTYAQLHSLTLRREATEPPPSQEGPSPAVPSIYATLAIH

SEQ ID NO: 79 - protein, 253 aa, Artificial Sequence
  LILRB1 hinge-transmembrane-intracellular domain
YGSQSSKPYLLTHPSDPLELVVSGPSGGPSSPTTGPTSTSGPEDQPLTPTGSDPQSGLGRHLGVVIGILVAVILLLLLLLLLFLILRHRRQGKHWTSTQRKADFQHPAGAVGPEPTDRGLQWRSSPAADAQEENLYAAVKHTQPEDGVEMDTRSPHDEDPQAVTYAEVKHSRPRREMASPPSPLSGEFLDTKDRQAEEDRQMDTEAAASEAPQDVTYAQLHSLTLRREATEPPPSQEGPSPAVPSIYATLAIH

SEQ ID NO: 80 - protein, 233 aa, Artificial Sequence
  LILRB1 hinge-transmembrane-intracellular domain
VVSGPSGGPSSPTTGPTSTSGPEDQPLTPTGSDPQSGLGRHLGVVIGILVAVILLLLLLLLLFLILRHRRQGKHWTSTQRKADFQHPAGAVGPEPTDRGLQWRSSPAADAQEENLYAAVKHTQPEDGVEMDTRSPHDEDPQAVTYAEVKHSRPRREMASPPSPLSGEFLDTKDRQAEEDRQMDTEAAASEAPQDVTYAQLHSLTLRREATEPPPSQEGPSPAVPSIYATLAIH

SEQ ID NO: 81 - protein, 63 aa, Artificial Sequence
  LILRB1 hinge domain
YGSQSSKPYLLTHPSDPLELVVSGPSGGPSSPTTGPTSTSGPEDQPLTPTGSDPQSGLGRHLG

SEQ ID NO: 82 - protein, 23 aa, Artificial Sequence
  LILRB1 transmembrane domain
VVIGILVAVILLLLLLLLLFLIL

SEQ ID NO: 83 - protein, 237 aa, Artificial Sequence
  C-002357 MSLN_(M5)
QVQLVQSGAEVEKPGASVKVSCKASGYTFTDYYMHWVRQAPGQGLEWMGWINPNSGGTNYAQKFQGRVTMTRDTSISTAYMELSRLRSDDTAVYYCASGWDFDYWGQGTLVTVSSGGGGSGGGGSGGGGSGGDIVMTQSSSLSASVGDRVTITCRASQSIRYYLSWYQQKPGKAPKLLIYTASILQNGVPSRFSGSGSGTDFTLTISSLQPEDFATYYCLQTYTTPDFGPGTKVEIK

SEQ ID NO: 84 - DNA, 711 bp, Artificial Sequence
  C-002357 MSLN_(M5)
caggtgcagctggtgcagtctggggctgaggtggagaagcctggggcctcagtgaaggtctcctgcaaggcttctggatacaccttcaccgactactatatgcactgggtgcgacaggcccctggacaagggcttgagtggatgggatggatcaaccctaacagtggtggcacaaactatgcacagaagtttcagggcagggtcaccatgaccagggacacgtccatcagcacagcctacatggagctgagcaggctgagatctgacgacacggccgtgtattactgtgcgtctggctgggactttgactactggggccagggaaccctggtcaccgtgtcctcaggcggaggtggaagcggagggggaggatctggcggcggaggaagcggaggcgacatcgtgatgacccagtcttcctccctgtctgcatctgtcggagacagagtcaccatcacttgccgggccagtcagagcattaggtactatttaagttggtatcagcagaaaccaggaaaagcccctaagctcctgatctatactgcatccattttacaaaatggggtcccatcaaggttcagtggcagtggatctgggacagatttcactctcaccatcagcagcctgcaacctgaggattttgcaacttattactgcctccagacttacactactccggactttggcccagggaccaaggtggaaatcaaa

SEQ ID NO: 85 - protein, 246 aa, Artificial Sequence
  C-002358 MSLN_(M14)
QVQLVQSGAEVRAPGASVKISCKASGFTFRGYYIHWVRQAPGQGLEWMGIINPSGGSRAYAQKFQGRVTMTRDTSTSTVYMELSSLRSDDTAMYYCARTASCGGDCYYLDYWGQGTLVTVSSGGGGSGGGGSGGGGSGGDIQMTQSPPTLSASVGDRVTITCRASENVNIWLAWYQQKPGKAPKLLIYKSSSLASGVPSRFSGSGSGAEFTLTISSLQPDDFATYYCQQYQSYPLTFGGGTKVEIK

SEQ ID NO: 86 - DNA, 738 bp, Artificial Sequence
  C-002358 MSLN_(M14)
caggtgcagctggtgcagtctggggctgaggtgagggcacctggggcctcagtgaagatttcctgcaaggcttctggattcaccttcagaggctactatatccactgggtgcgacaggcccctggacaagggcttgagtggatgggaatcatcaaccctagtggtggtagcagagcctacgcacagaagttccagggcagggtcaccatgaccagggacacttccacgagcacagtctacatggagctgagcagcctgagatctgacgacacggccatgtattactgtgcgagaaccgcaagttgtggtggtgactgctactaccttgactactggggccagggaaccctggtcaccgtgtcctcaggcggaggtggaagcggagggggaggatctggcggcggaggaagcggaggcgacatccagatgacccagtctcctcccaccctgtctgcatctgtaggagacagagtcaccatcacttgccgggccagtgagaatgttaatatctggttggcctggtatcagcagaaaccagggaaagcccctaagctcctgatctataagtcatccagtttagcaagtggggtcccatcaaggttcagtggcagtggatctggggcagaattcactctcaccatcagcagcctgcagcctgatgattttgcaacttattactgccaacagtatcaaagttaccccctcactttcggcggagggaccaaggtggaaatcaaa

SEQ ID NO: 87 - protein, 242 aa, Artificial Sequence
  C-002359 MSLN_(S5H)
QVQLVQSGAEVKKPGASVKVSCKASGYSFTGYTMNWVRQAPGQRLEWMGLITPYNGASSYNQKFRGRVTITRDTSASTAYMELSSLRSEDTAVYYCARGGYDGRGFDYWGQGTTVTVSSGGGGSGGGGSGGGGSGGDIQMTQSPSSLSASVGDRVTITCSASSSVSYMHWYQQKPGKAPKRLIYDTSKLASGVPSRFSGSGSGTEFTLTISSLQPEDFATYYCQQWSGYPLTFGQGTKLEIK

SEQ ID NO: 88 - DNA, 726 bp, Artificial Sequence
  C-002359 MSLN_(S5H)
caggtgcagctggtgcagtctggggctgaggtgaagaagcctggggcctcagtgaaggtttcctgcaaggcttctggatactcattcaccggctacaccatgaactgggtgaggcaggcccctggacaaagacttgagtggatgggacttatcaccccttacaatggtgcttctagctacaaccagaagttcaggggcagggtcacaatcactagagacacgtcagccagcacagcctacatggagctctccagcctgagatctgaagacactgcagtctattactgtgcaagggggggttacgacgggaggggttttgactactggggccagggaaccacggtcaccgtgtcctcaggcggaggtggaagcggagggggaggatctggcggcggaggaagcggaggcgacatccagatgacccagtctccttcaagcttgtctgcatctgtaggagacagggtcaccatcacttgcagtgccagctcaagtgtaagttacatgcactggtatcagcagaaaccaggcaaggcccctaagagattgatctatgacacatccaaattagcaagtggggtcccaagtcgcttcagtggcagtggatctgggaccgaattcactctcaccatcagcagcttgcagcctgaggattttgcaacttattactgccagcagtggagtggttaccctctcacgttcggtcaggggacaaagttggaaatcaaa

SEQ ID NO: 89 - protein, 242 aa, Artificial Sequence
  C-002360 MSLN_(S5M)
QVQLQQSGPELEKPGASVKISCKASGYSFTGYTMNWVKQSHGKSLEWIGLITPYNGASSYNQKFRGKATLTVDKSSSTAYMDLLSLTSEDSAVYFCARGGYDGRGFDYWGQGTTVTVSSGGGGSGGGGSGGGGSGGDIELTQSPAIMSASPGEKVTMTCSASSSVSYMHWYQQKSGTSPKRWIYDTSKLASGVPGRFSGSGSGNSYSLTISSVEAEDDATYYCQQWSGYPLTFGAGTKLEIK

SEQ ID NO: 90 - DNA, 726 bp, Artificial Sequence
  C-002360 MSLN_(S5M)
caggtgcagctgcagcagtctgggcctgagctggagaagcctggggcctcagtgaagatttcctgcaaggcttctggatactcattcaccggctacaccatgaactgggtgaagcagagccatggaaaaagccttgagtggattggacttatcaccccttacaatggtgcttctagctacaaccagaagttcaggggcaaggccacattaactgtagacaagtcatccagcacagcctacatggacctcctcagcctgacatctgaagactctgcagtctatttctgtgcaagggggggttacgacgggaggggttttgactactggggccagggaaccacggtcaccgtgtcctcaggcggaggtggaagcggagggggaggatctggcggcggaggaagcggaggcgacatcgagctcacccagtctcctgcaatcatgtctgcatctccaggagagaaggtcaccatgacttgcagtgccagctcaagtgtaagttacatgcactggtatcagcagaaatcaggcacctcccctaagagatggatctatgacacatccaaattggcaagtggggtcccaggtcgcttcagtggcagtggatctgggaactcttactctctcaccatcagcagcgtggaggctgaggatgatgcaacttattactgccagcagtggagtggttaccctctcacgttcggtgctgggacaaagttggaaatcaaa

SEQ ID NO: 91 - protein, 243 aa, Artificial Sequence
  C-002361 CEACAM5_(MFE23M)
QVQLQQSGAELVRSGTSVKLSCTASGFNIKDSYMHWLRQGPEQGLEWIGWIDPENGDTEYAPKFQGKATFTTDTSSNTAYLQLSSLTSEDTAVYYCNEGTPTGPYYFDYWGQGTTVTVSSGGGGSGGGGSGGGGSGGENVLTQSPAIMSASPGEKVTITCSASSSVSYMHWFQQKPGTSPKLWIYSTSNLASGVPARFSGSGSGTSYSLTISRMEAEDAATYYCQQRSSYPLTFGAGTKLELK

SEQ ID NO: 92 - DNA, 729 bp, Artificial Sequence
  C-002361 CEACAM5_(MFE23M)
caggtccagctgcagcagtctggggcagagcttgtgaggtcagggacctcagtcaagttgtcctgcacagcttctggcttcaacattaaagactcctatatgcactggttgaggcaggggcctgaacagggcctggagtggattggatggattgatcctgagaatggtgatactgaatatgccccgaagttccagggcaaggccacttttactacagacacatcctccaacacagcctacctgcagctcagcagcctgacatctgaggacactgccgtctattactgtaatgaagggacaccgacagggccatactattttgactactggggtcaaggaaccacagtcaccgtgtcctcaggcggaggtggaagcggagggggaggatctggcggcggaggaagcggaggcgagaacgttctcacccagtctccagcaatcatgtctgcatctccaggggagaaggtcaccataacctgcagtgccagctcaagtgtaagttacatgcactggttccagcagaagccaggcacttctcccaaactctggatttatagcacatccaacctggcttctggagtccctgctcgcttcagtggcagtggatctgggacctcttactctctcacaatcagccgaatggaggctgaagatgctgccacttattactgccagcaaaggagtagttacccgctcacgttcggtgctgggaccaagctggagctgaaa

SEQ ID NO: 93 - protein, 243 aa, Artificial Sequence
  C-002362 CEACAM5_(MFE23H)
QVQLVQSGAEVKKPGASVKVSCKASGFNIKDSYMHWVRQAPGQGLEWMGWIDPENGDTEYAPKFQGRVTMTTDTSTSTAYMELRSLRSDDTAVYYCNEGTPTGPYYFDYWGQGTTVTVSSGGGGSGGGGSGGGGSGGEIVLTQSPATLSLSPGERATLSCSASSSVSYMHWYQQKPGLAPRLLIYSTSNLASGIPDRFSGSGSGTDFTLTISRLEPEDFAVYYCQQRSSYPLTFGQGTKLEIK

SEQ ID NO: 94 - DNA, 729 bp, Artificial Sequence
  C-002362 CEACAM5_(MFE23H)
caggtccagctggtgcagtctggggcagaggtgaagaaaccaggggcctcagtcaaggtgtcctgcaaagcttctggcttcaacattaaagactcctatatgcactgggtgaggcaggcgcctggacagggcctggagtggatgggatggattgatcctgagaatggtgatactgaatatgccccgaagttccagggcagggtcactatgactacagacacatccacctccacagcctacatggagctcaggagcctgagatctgacgacactgccgtctattactgtaatgaagggacaccgacagggccatactattttgactactggggtcaaggaaccacagtcaccgtgtcctcaggcggaggtggaagcggagggggaggatctggcggcggaggaagcggaggcgagatcgttctcacccagtctccagcaaccttgtctctgtctccaggggagagggccaccctaagctgcagtgccagctcaagtgtaagttacatgcactggtaccagcagaagccaggccttgctcccagactcctgatttatagcacatccaacctggcttctggaatccctgatcgcttcagtggcagtggatctgggaccgatttcactctcacaatcagccgactggagcctgaagatttcgccgtttattactgccagcaaaggagtagttacccgctcacgttcggtcaggggaccaagctggagatcaaa

SEQ ID NO: 95 - protein, 243 aa, Artificial Sequence
  CEACAM5 Binding Domain C-002363 CEACAM5_(E8)
EVQLAESGGGLVQPGGSLRLSCAASGFTFSSDAMSWVRQAPGKGLEWVSAISGSGGSTYYADSVKGRFTISRDNSKNTLYLQMNSLRAEDTAVYYCAKSNEFLFDYWGQGTLVTVSSGGGGSGGGGSGGGGSGGSSELTQDPAVSVALGQTVRITCQGDSLRSSYASWYRQRPGQAPVLVIYGKNNRPSGIPDRFSGSSSGNTASLTITGAQAEDEADYYWNSSYAWLPYVVFGGGTKLTVLG

SEQ ID NO: 96 - DNA, 729 bp, Artificial Sequence
  C-002363 CEACAM5_(E8)
gaggtgcagctggcggagtctgggggaggcttggtacagcctggggggtccctgagactctcctgtgcagcctctggattcacctttagcagcgatgccatgagctgggtccgccaggctccagggaaggggctggagtgggtctcagctattagtggtagtggtggtagcacatactacgcagactccgtgaagggccggttcaccatctccagagacaattccaagaacacgctgtatctgcaaatgaacagcctgagagccgaggacacggccgtgtattactgtgcaaagtctaatgagtttctttttgactactggggccaaggtaccctggtcaccgtgtcgagtggcggaggtggaagcggagggggaggatctggcggcggaggaagcggaggctcttctgagctgactcaggaccctgctgtgtctgtggccttgggacagacagtcaggatcacatgccaaggagacagcctcagaagctcttatgcaagctggtaccggcagaggccaggacaggcccctgtacttgtcatctatggtaaaaacaaccggccctcagggatcccagaccgattctctggctccagctcaggaaacacagcttccttgaccatcactggggctcaggcggaagatgaggctgactattactggaactccagctacgcttggctgccctacgtggtattcggcggagggaccaagctgaccgtcctaggt

SEQ ID NO: 97 - protein, 243 aa, Artificial Sequence
  C-002364 CEACAM5_(SM3E)
QVQLEQSGAGVVKPGASVKLSCKASGFNIKDSYMHWLRQGPGQRLEWIGWIDPENGDTEYAPKFQGKATFTTDTSANTAYLGLSSLRPEDTAVYYCNEGTPTGPYYFDYWGQGTLVTVSSGGGGSGGGGSGGGGSGGENVLTQSPSSMSVSVGDRVNIACSASSSVPYMHWLQQKPGKSPKLLIYLTSNLASGVPSRFSGSGSGTDYSLTISSVQPEDAATYYCQQRSSYPLTFGGGTKLEIK

SEQ ID NO: 98 - DNA, 729 bp, Artificial Sequence
  C-002364 CEACAM5_(SM3E)
caggtccagctggagcagtctggggcaggggttgtgaagccaggggcctcagtcaagttgtcctgcaaagcttctggcttcaacattaaagactcctatatgcactggttgaggcaggggcctggacagcgcctggagtggattggatggattgatcctgagaatggtgatactgaatatgccccgaagttccagggcaaggccacttttactacagacacatccgccaacacagcctacctggggctcagcagcctgagacctgaggacactgccgtctattactgtaatgaagggacaccgacagggccatactattttgactactggggtcaaggaaccctagtcaccgtgtcctcaggcggaggtggaagcggagggggaggatctggcggcggaggaagcggaggcgagaacgttctcacccagtctccaagctctatgtctgtatctgtcggggacagggtcaacatcgcctgcagtgccagctcaagtgtaccttacatgcactggctccagcagaagccaggcaaatctcccaaactcctgatttatctcacatccaacctggcttctggagtccctagccgcttcagtggcagtggatctgggaccgattactctctcacaatcagctcagtgcagcctgaagatgctgccacttattactgccagcaaaggagtagttacccgctcacgttcggtggtgggaccaagctggagatcaaa

SEQ ID NO: 99 - protein, 249 aa, Artificial Sequence
  CT-478 EGFR (VH-VL ScFv Format)
QVQLVESGGGVVQPGRSLRLSCAASGFTFSTYGMHWVRQAPGKGLEWVAVIWDDGSYKYYGDSVKGRFTISRDNSKNTLYLQMNSLRAEDTAVYYCARDGITMVRGVMKDYFDYWGQGTLVTVSSGGGGSGGGGSGGGGSGGAIQLTQSPSSLSASVGDRVTITCRASQDISSALVWYQQKPGKAPKLLIYDASSLESGVPSRFSGSESGTDFTLTISSLQPEDFATYYCQQFNSYPLTFGGGTKVEIK

SEQ ID NO: 100 - DNA, 747 bp, Artificial Sequence
  CT-478 EGFR
caggtgcagctggtggagtctgggggaggcgtggtccagcctgggaggtccctgagactctcctgtgcagcgtctggattcaccttcagtacctatggcatgcactgggtccgccaggctccaggcaaggggctggagtgggtggcagttatatgggatgatggaagttataaatactatggagactccgtgaagggccgattcaccatctccagagacaattccaagaacacgctgtatctgcaaatgaacagcctgagagccgaggacacggctgtgtattactgtgcgagagatggtattactatggttcggggagttatgaaggactactttgactactggggccagggaaccctggtcaccgtctcctcaggcggaggtggaagcggagggggaggatctggcggcggaggaagcggaggcgccatccagttgacccagtctccatcctccctgtctgcatctgtaggagacagagtcaccatcacttgccgggcaagtcaggacattagcagtgctttagtctggtatcagcagaaaccagggaaagctcctaagctcctgatctatgatgcctccagtttggaaagtggggtcccatcaaggttcagcggcagtgaatctgggacagatttcactctcaccatcagcagcctgcagcctgaagattttgcaacttattactgtcaacagtttaatagttacccgctcactttcggcggagggaccaaggtggagatcaaa

SEQ ID NO: 101 - protein, 249 aa, Artificial Sequence
  CT-479 EGFR (VL-VH ScFv Format)
AIQLTQSPSSLSASVGDRVTITCRASQDISSALVWYQQKPGKAPKLLIYDASSLESGVPSRFSGSESGTDFTLTISSLQPEDFATYYCQQFNSYPLTFGGGTKVEIKGGGGSGGGGSGGGGSGGQVQLVESGGGVVQPGRSLRLSCAASGFTFSTYGMHWVRQAPGKGLEWVAVIWDDGSYKYYGDSVKGRFTISRDNSKNTLYLQMNSLRAEDTAVYYCARDGITMVRGVMKDYFDYWGQGTLVTVSS

SEQ ID NO: 102 - DNA, 747 bp, Artificial Sequence
  CT-479 EGFR
gccatccagttgacccagtctccatcctccctgtctgcatctgtaggagacagagtcaccatcacttgccgggcaagtcaggacattagcagtgctttagtctggtatcagcagaaaccagggaaagctcctaagctcctgatctatgatgcctccagtttggaaagtggggtcccatcaaggttcagcggcagtgaatctgggacagatttcactctcaccatcagcagcctgcagcctgaagattttgcaacttattactgtcaacagtttaatagttacccgctcactttcggcggagggaccaaggtggagatcaaaggcggaggtggaagcggagggggaggatctggcggcggaggaagcggaggccaggtgcagctggtggagtctgggggaggcgtggtccagcctgggaggtccctgagactctcctgtgcagcgtctggattcaccttcagtacctatggcatgcactgggtccgccaggctccaggcaaggggctggagtgggtggcagttatatgggatgatggaagttataaatactatggagactccgtgaagggccgattcaccatctccagagacaattccaagaacacgctgtatctgcaaatgaacagcctgagagccgaggacacggctgtgtattactgtgcgagagatggtattactatggttcggggagttatgaaggactactttgactactggggccagggaaccctggtcaccgtctcctca

SEQ ID NO: 103 - protein, 247 aa, Artificial Sequence
  CT-480 EGFR (VH-VL ScFv format)
QIQLVQSGPELKKPGETVKISCKASGYTFTEYPIHWVKQAPGKGFKWMGMIYTDIGKPTYAEEFKGRFAFSLETSASTAYLQINNLKNEDTATYFCVRDRYDSLFDYWGQGTTLTVSSGGGGSGGGGSGGGGSGGDVVMTQTPLSLPVSLGDQASISCRSSQSLVHSNGNTYLHWYLQKPGQSPKLLIYKVSNRFSGVPDRFSGSGSGTDFTLKISRVEAEDLGVYFCSQSTHVPWTFGGGTKLEIK

SEQ ID NO: 104 - DNA, 741 bp, Artificial Sequence
  CT-480 EGFR
cagatccagttggtgcagtctggacctgagctgaagaagcctggagagacagtcaagatctcctgcaaggcctctgggtataccttcacagaatatccaatacactgggtgaagcaggctccaggaaagggtttcaagtggatgggcatgatatacaccgacattggaaagccaacatatgctgaagagttcaagggacggtttgccttctctttggagacctctgccagcactgcctatttgcagatcaacaacctcaagaatgaggacacggctacatatttctgtgtaagagatcgatatgattccctctttgactactggggccaaggcaccactctcacagtctcctcaggcggaggtggaagcggagggggaggatctggcggcggaggaagcggaggcgatgttgtgatgacccaaactccactctccctgcctgtcagtcttggagatcaagcctccatctcttgcagatctagtcagagccttgtacacagtaatggaaacacctatttacattggtacctgcagaagccaggccagtctccaaagctcctgatctacaaagtttccaaccgattttctggggtcccagacaggttcagtggcagtggatcagggacagatttcacactcaagatcagcagagtggaggctgaggatctgggagtttatttctgctctcaaagtacacatgttccgtggacgttcggtggaggcaccaagctggaaatcaaa

SEQ ID NO: 105 - protein, 247 aa, Artificial Sequence
  CT-481 EGFR (VL-VH ScFv Format)
DVVMTQTPLSLPVSLGDQASISCRSSQSLVHSNGNTYLHWYLQKPGQSPKLLIYKVSNRFSGVPDRFSGSGSGTDFTLKISRVEAEDLGVYFCSQSTHVPWTFGGGTKLEIKGGGGSGGGGSGGGGSGGQIQLVQSGPELKKPGETVKISCKASGYTFTEYPIHWVKQAPGKGFKWMGMIYTDIGKPTYAEEFKGRFAFSLETSASTAYLQINNLKNEDTATYFCVRDRYDSLFDYWGQGTTLTVSS

SEQ ID NO: 106 - DNA, 741 bp, Artificial Sequence
  CT-481 EGFR
gatgttgtgatgacccaaactccactctccctgcctgtcagtcttggagatcaagcctccatctcttgcagatctagtcagagccttgtacacagtaatggaaacacctatttacattggtacctgcagaagccaggccagtctccaaagctcctgatctacaaagtttccaaccgattttctggggtcccagacaggttcagtggcagtggatcagggacagatttcacactcaagatcagcagagtggaggctgaggatctgggagtttatttctgctctcaaagtacacatgttccgtggacgttcggtggaggcaccaagctggaaatcaaaggcggaggtggaagcggagggggaggatctggcggcggaggaagcggaggccagatccagttggtgcagtctggacctgagctgaagaagcctggagagacagtcaagatctcctgcaaggcctctgggtataccttcacagaatatccaatacactgggtgaagcaggctccaggaaagggtttcaagtggatgggcatgatatacaccgacattggaaagccaacatatgctgaagagttcaagggacggtttgccttctctttggagacctctgccagcactgcctatttgcagatcaacaacctcaagaatgaggacacggctacatatttctgtgtaagagatcgatatgattccctctttgactactggggccaaggcaccactctcacagtctcctca

SEQ ID NO: 107 - protein, 249 aa, Artificial Sequence
  CT-482 EGFR (VH-VL ScFv Format)
EMQLVESGGGFVKPGGSLKLSCAASGFAFSHYDMSWVRQTPKQRLEWVAYIASGGDITYYADTVKGRFTISRDNAQNTLYLQMSSLKSEDTAMFYCSRSSYGNNGDALDFWGQGTSVTVSSGGGGSGGGGSGGGGSGGDVVMTQTPLSLPVSLGDQASISCRSSQSLVHSNGNTYLHWYLQKPGQSPKLLIYKVSNRFSGVPDRFSGSGSGTDFTLKISRVEAEDLGVYFCSQSTHVLTFGSGTKLEIK

SEQ ID NO: 108 - DNA, 747 bp, Artificial Sequence
  CT-482 EGFR
gaaatgcagctggtggagtctgggggaggcttcgtgaagcctggagggtccctgaaactctcatgtgcagcctctggattcgctttcagtcactatgacatgtcttgggttcgccagactccgaagcagaggctggagtgggtcgcatacattgctagtggtggtgatatcacctactatgcagacactgtgaagggccgattcaccatctccagagacaatgcccagaacaccctgtacctgcaaatgagcagtctgaagtctgaggacacagccatgttttactgttcacgatcctcctatggtaacaacggagatgccctggacttctggggtcaaggtacctcagtcaccgtctcctcaggcggaggtggaagcggagggggaggatctggcggcggaggaagcggaggcgatgttgtgatgacccaaactccactctccctgcctgtcagtcttggagatcaagcctccatctcttgcagatctagtcagagccttgttcacagtaatggaaacacctatttacattggtacctgcagaagccaggccagtctccaaagctcctgatctacaaagtttccaaccgattttctggggtcccagacaggttcagtggcagtggatcagggacagatttcacactcaagatcagcagagtggaggctgaggatctgggagtttatttctgctctcaaagtacacatgttctcacgttcggctcggggacaaagttggaaataaaa

SEQ ID NO: 109 - protein, 249 aa, Artificial Sequence
  CT-483 EGFR (VL-VH ScFv Format)
DVVMTQTPLSLPVSLGDQASISCRSSQSLVHSNGNTYLHWYLQKPGQSPKLLIYKVSNRFSGVPDRFSGSGSGTDFTLKISRVEAEDLGVYFCSQSTHVLTFGSGTKLEIKGGGGSGGGGSGGGGSGGEMQLVESGGGFVKPGGSLKLSCAASGFAFSHYDMSWVRQTPKQRLEWVAYIASGGDITYYADTVKGRFTISRDNAQNTLYLQMSSLKSEDTAMFYCSRSSYGNNGDALDFWGQGTSVTVSS

SEQ ID NO: 110 - DNA, 747 bp, Artificial Sequence
  CT-483 EGFR
gatgttgtgatgacccaaactccactctccctgcctgtcagtcttggagatcaagcctccatctcttgcagatctagtcagagccttgttcacagtaatggaaacacctatttacattggtacctgcagaagccaggccagtctccaaagctcctgatctacaaagtttccaaccgattttctggggtcccagacaggttcagtggcagtggatcagggacagatttcacactcaagatcagcagagtggaggctgaggatctgggagtttatttctgctctcaaagtacacatgttctcacgttcggctcggggacaaagttggaaataaaaggcggaggtggaagcggagggggaggatctggcggcggaggaagcggaggcgaaatgcagctggtggagtctgggggaggcttcgtgaagcctggagggtccctgaaactctcatgtgcagcctctggattcgctttcagtcactatgacatgtcttgggttcgccagactccgaagcagaggctggagtgggtcgcatacattgctagtggtggtgatatcacctactatgcagacactgtgaagggccgattcaccatctccagagacaatgcccagaacaccctgtacctgcaaatgagcagtctgaagtctgaggacacagccatgttttactgttcacgatcctcctatggtaacaacggagatgccctggacttctggggtcaaggtacctcagtcaccgtctcctca

SEQ ID NO: 111 - protein, 243 aa, Artificial Sequence
  CT-486 EGFR (VH-VL ScFv Format)
QVQLKQSGPGLVQPSQSLSITCTVSGFSLTNYGVHWVRQSPGKGLEWLGVIWSGGNTDYNTPFTSRLSINKDNSKSQVFFKMNSLQSNDTAIYYCARALTYYDYEFAYWGQGTLVTVSAGGGGSGGGGSGGGGSGGDILLTQSPVILSVSPGERVSFSCRASQSIGTNIHWYQQRTNGSPRLLIKYASESISGIPSRFSGSGSGTDFTLSINSVESEDIADYYCQQNNNWPTTFGAGTKLELK

SEQ ID NO: 112 - DNA, 729 bp, Artificial Sequence
  CT-486 EGFR
caggtgcagctgaagcagtccggccccggcctggtgcagccctcccagtccctgtccatcacctgcaccgtgtccggcttctccctgaccaactacggcgtgcactgggtgcggcagtcccccggcaagggcctggagtggctgggcgtgatctggtccggcggcaacaccgactacaacacccccttcacctcccggctgtccatcaacaaggacaactccaagtcccaggtgttcttcaagatgaactccctgcagtccaacgacaccgccatctactactgcgcccgggccctgacctactacgactacgagttcgcctactggggccagggcaccctggtgaccgtgtccgccggcggaggtggaagcggagggggaggatctggcggcggaggaagcggaggcgacatcctgctgacccagtcccccgtgatcctgtccgtgtcccccggcgagcgggtgtccttctcctgccgggcctcccagtccatcggcaccaacatccactggtaccagcagcggaccaacggctccccccggctgctgatcaagtacgcctccgagtccatctccggcatcccctcccggttctccggctccggctccggcaccgacttcaccctgtccatcaactccgtggagtccgaggacatcgccgactactactgccagcagaacaacaactggcccaccaccttcggcgccggcaccaagctggagctgaag

SEQ ID NO: 113 - protein, 244 aa, Artificial Sequence
  CT-487 EGFR (VH-VL ScFv Format)
QVQLVQSGAEVKKPGASVKVSCKASGYTFTSHWMHWVRQAPGQGLEWIGEFNPSNGRTNYNEKFKSKATMTVDTSTNTAYMELSSLRSEDTAVYYCASRDYDYDGRYFDYWGQGTLVTVSSGGGGSGGGGSGGGGSGGDIQMTQSPSSLSASVGDRVTITCSASSSVTYMYWYQQKPGKAPKLLIYDTSNLASGVPSRFSGSGSGTDYTFTISSLQPEDIATYYCQQWSSHIFTFGQGTKVEIK

SEQ ID NO: 114 - DNA, 731 bp, Artificial Sequence
  CT-487 EGFR
aggtgcagctggtgcagtccggcgccgaggtgaagaagcccggcgcctccgtgaaggtgtcctgcaaggcctccggctacaccttcacctcccactggatgcactgggtgcggcaggcccccggccagggcctggagtggatcggcgagttcaacccctccaacggccggaccaactacaacgagaagttcaagtccaaggccaccatgaccgtggacacctccaccaacaccgcctacatggagctgtcctccctgcggtccgaggacaccgccgtgtactactgcgcctcccgggactacgactacgacggccggtacttcgactactggggccagggcaccctggtgaccgtgtcctccggcggaggtggaagcggagggggaggatctggcggcggaggaagcggaggcgacatccagatgacccagtccccctcctccctgtccgcctccgtgggcgaccgggtgaccatcacctgctccgcctcctcctccgtgacctacatgtactggtaccagcagaagcccggcaaggcccccaagctgctgatctacgacacctccaacctggcctccggcgtgccctcccggttctccggctccggctccggcaccgactacaccttcaccatctcctccctgcagcccgaggacatcgccacctactactgccagcagtggtcctcccacatcttcaccttcggccagggcaccaaggtggagatcaag

SEQ ID NO: 115 - protein, 243 aa, Artificial Sequence
  CT-488 EGFR (VH-VL ScFv Format)
QVQLQESGPGLVKPSETLSLTCTVSGGSVSSGDYYWTWIRQSPGKGLEWIGHIYYSGNTNYNPSLKSRLTISIDTSKTQFSLKLSSVTAADTAIYYCVRDRVTGAFDIWGQGTMVTVSSGGGGSGGGGSGGGGSGGDIQMTQSPSSLSASVGDRVTITCQASQDISNYLNWYQQKPGKAPKLLIYDASNLETGVPSRFSGSGSGTDFTFTISSLQPEDIATYFCQHFDHLPLAFGGGTKVEIK

SEQ ID NO: 116 - DNA, 729 bp, Artificial Sequence
  CT-488 EGFR
caggtgcagctgcaggagtccggccccggcctggtgaagccctccgagaccctgtccctgacctgcaccgtgtccggcggctccgtgtcctccggcgactactactggacctggatccggcagtcccccggcaagggcctggagtggatcggccacatctactactccggcaacaccaactacaacccctccctgaagtcccggctgaccatctccatcgacacctccaagacccagttctccctgaagctgtcctccgtgaccgccgccgacaccgccatctactactgcgtgcgggaccgggtgaccggcgccttcgacatctggggccagggcaccatggtgaccgtgtcctccggcggaggtggaagcggagggggaggatctggcggcggaggaagcggaggcgacatccagatgacccagtccccctcctccctgtccgcctccgtgggcgaccgggtgaccatcacctgccaggcctcccaggacatctccaactacctgaactggtaccagcagaagcccggcaaggcccccaagctgctgatctacgacgcctccaacctggagaccggcgtgccctcccggttctccggctccggctccggcaccgacttcaccttcaccatctcctccctgcagcccgaggacatcgccacctacttctgccagcacttcgaccacctgcccctggccttcggcggcggcaccaaggtggagatcaag

SEQ ID NO: 117 - protein, 125 aa, Artificial Sequence [sequence omitted]

SEQ ID NO: 118 - protein, 107 aa, Artificial Sequence [sequence omitted]

SEQ ID NO: 119 - protein, 118 aa, Artificial Sequence
  CT480, CT481 VH
QIQLVQSGPELKKPGETVKISCKASGYTFTEYPIHWVKQAPGKGFKWMGMIYTDIGKPTYAEEFKGRFAFSLETSASTAYLQINNLKNEDTATYFCVRDRYDSLFDYWGQGTTLTVSS

SEQ ID NO: 120 - protein, 112 aa, Artificial Sequence
  CT480, CT481 VL
DVVMTQTPLSLPVSLGDQASISCRSSQSLVHSNGNTYLHWYLQKPGQSPKLLIYKVSNRFSGVPDRFSGSGSGTDFTLKISRVEAEDLGVYFCSQSTHVPWTFGGGTKLEIK

SEQ ID NO: 121 - protein, 121 aa, Artificial Sequence
  CT482, CT483 VH
EMQLVESGGGFVKPGGSLKLSCAASGFAFSHYDMSWVRQTPKQRLEWVAYIASGGDITYYADTVKGRFTISRDNAQNTLYLQMSSLKSEDTAMFYCSRSSYGNNGDALDFWGQGTSVTVSS

SEQ ID NO: 122 - protein, 111 aa, Artificial Sequence
  CT482, CT483 VL
DVVMTQTPLSLPVSLGDQASISCRSSQSLVHSNGNTYLHWYLQKPGQSPKLLIYKVSNRFSGVPDRFSGSGSGTDFTLKISRVEAEDLGVYFCSQSTHVLTFGSGTKLEIK

SEQ ID NO: 123 - protein, 119 aa, Artificial Sequence
  CT486 VH
QVQLKQSGPGLVQPSQSLSITCTVSGFSLTNYGVHWVRQSPGKGLEWLGVIWSGGNTDYNTPFTSRLSINKDNSKSQVFFKMNSLQSNDTAIYYCARALTYYDYEFAYWGQGTLVTVSA

SEQ ID NO: 124 - protein, 107 aa, Artificial Sequence
  CT486 VL
DILLTQSPVILSVSPGERVSFSCRASQSIGTNIHWYQQRTNGSPRLLIKYASESISGIPSRFSGSGSGTDFTLSINSVESEDIADYYCQQNNNWPTTFGAGTKLELK

SEQ ID NO: 125 - protein, 121 aa, Artificial Sequence [sequence omitted]

SEQ ID NO: 126 - protein, 106 aa, Artificial Sequence [sequence omitted]

SEQ ID NO: 127 - protein, 119 aa, Artificial Sequence [sequence omitted]

SEQ ID NO: 128 - protein, 107 aa, Artificial Sequence [sequence omitted]

SEQ ID NO: 129 - protein, 5 aa, Artificial Sequence
  EGFR Binder HCDR1
TYGMH

SEQ ID NO: 130 - protein, 5 aa, Artificial Sequence
  EGFR Binder HCDR1
EYPIH

SEQ ID NO: 131 - protein, 5 aa, Artificial Sequence
  EGFR Binder HCDR1
HYDMS

SEQ ID NO: 132 - protein, 5 aa, Artificial Sequence
  EGFR Binder HCDR1
NYGVH

SEQ ID NO: 133 - protein, 5 aa, Artificial Sequence
  EGFR Binder HCDR1
SHWMH

SEQ ID NO: 134 - protein, 7 aa, Artificial Sequence
  EGFR Binder HCDR1
SGDYYWT

SEQ ID NO: 135 - protein, 17 aa, Artificial Sequence
  EGFR Binder HCDR2
VIWDDGSYKYYGDSVKG

SEQ ID NO: 136 - protein, 17 aa, Artificial Sequence
  EGFR Binder HCDR2
MIYTDIGKPTYAEEFKG

SEQ ID NO: 137 - protein, 17 aa, Artificial Sequence
  EGFR Binder HCDR2
YIASGGDITYYADTVKG

SEQ ID NO: 138 - protein, 16 aa, Artificial Sequence
  EGFR Binder HCDR2
VIWSGGNTDYNTPFTS

SEQ ID NO: 139 - protein, 17 aa, Artificial Sequence
  EGFR Binder HCDR2
EFNPSNGRTNYNEKFKS

SEQ ID NO: 140 - protein, 16 aa, Artificial Sequence
  EGFR Binder HCDR2
HIYYSGNTNYNPSLKS

SEQ ID NO: 141 - protein, 16 aa, Artificial Sequence
  EGFR Binder HCDR3
DGITMVRGVMKDYFDY

SEQ ID NO: 142 - protein, 9 aa, Artificial Sequence
  EGFR Binder HCDR3
DRYDSLFDY

SEQ ID NO: 143 - protein, 12 aa, Artificial Sequence
  EGFR Binder HCDR3
SSYGNNGDALDF

SEQ ID NO: 144 - protein, 11 aa, Artificial Sequence
  EGFR Binder HCDR3
ALTYYDYEFAY

SEQ ID NO: 145 - protein, 12 aa, Artificial Sequence
  EGFR Binder HCDR3
RDYDYDGRYFDY

SEQ ID NO: 146 - protein, 9 aa, Artificial Sequence
  EGFR Binder HCDR3
DRVTGAFDI

SEQ ID NO: 147 - protein, 11 aa, Artificial Sequence
  EGFR Binder LCDR1
RASQDISSALV

SEQ ID NO: 148 - protein, 16 aa, Artificial Sequence
  EGFR Binder LCDR1
RSSQSLVHSNGNTYLH

SEQ ID NO: 149 - protein, 11 aa, Artificial Sequence
  EGFR Binder LCDR1
RASQSIGTNIH

SEQ ID NO: 150 - protein, 10 aa, Artificial Sequence
  EGFR Binder LCDR1
SASSSVTYMY

SEQ ID NO: 151 - protein, 11 aa, Artificial Sequence
  EGFR Binder LCDR1
QASQDISNYLN

SEQ ID NO: 152 - protein, 7 aa, Artificial Sequence
  CDR-L1
DASSLES

SEQ ID NO: 153 - protein, 7 aa, Artificial Sequence
  EGFR Binder LCDR2
KVSNRFS

SEQ ID NO: 154 - protein, 7 aa, Artificial Sequence
  EGFR Binder LCDR2
YASESIS

SEQ ID NO: 155 - protein, 7 aa, Artificial Sequence
  EGFR Binder LCDR2
DTSNLAS

SEQ ID NO: 156 - protein, 7 aa, Artificial Sequence
  EGFR Binder LCDR2
DASNLET

SEQ ID NO: 157 - protein, 9 aa, Artificial Sequence
  CDR-L3
QQFNSYPLT

SEQ ID NO: 158 - protein, 9 aa, Artificial Sequence
  EGFR Binder LCDR3
SQSTHVPWT

SEQ ID NO: 159 - protein, 8 aa, Artificial Sequence
  EGFR Binder LCDR3
SQSTHVLT

SEQ ID NO: 160 - protein, 9 aa, Artificial Sequence
  EGFR Binder LCDR3
QQNNNWPTT

SEQ ID NO: 161 - protein, 9 aa, Artificial Sequence
  EGFR Binder LCDR3
QQWSSHIFT

SEQ ID NO: 162 - protein, 9 aa, Artificial Sequence
  EGFR Binder LCDR3
QHFDHLPLA

SEQ ID NO: 163 - protein, 246 aa, Artificial Sequence
  C-002170 W632 scFv (mouse)
QVQLKQSGPGLVQPSQSLSLTCTVSGFSLTSYGVHWVRQPPGKGLEWLGVIWSGGSTDYNAAFISRLSIRKDNSKSQVFFKMNSLQADDTAIYYCARTFTTSTSAWFAYWGQGTLVTVSAGGGGSGGGGSGGGGSGGSIVMTQTPKFLLVSAGDRVTITCKASQSVSNDVAWYQQKPGQSPICLLIYYASNRYTGVPDRFTGSGYGTDFTFTISTVQAEDLAVYFCQQDYSSPPWTFGGGTKLEIR

SEQ ID NO: 164 - DNA, 738 bp, Artificial Sequence
  C-002170 W632 scFv (mouse) DNA
caggtgcagctgaagcagtcaggacctggcctagtgcagccctcacagagcctgtccctgacctgcacagtctctggtttctcattaactagttatggcgtacactgggttcgccagcctccaggaaagggtctggagtggctgggagtgatctggagtggtggaagcacagactataatgctgctttcatatccagactgagcatcaggaaggacaactccaagagccaagtcttctttaaaatgaacagtctgcaagctgatgacacagccatatactactgtgccagaacctttactacgtctacctcggcctggtttgcttactggggccaagggactctggtcactgtctctgcaggcggaggtggaagcggagggggaggatctggcggcggaggaagcggaggcagcatcgtgatgacccagactccaaaattcctgcttgtgtctgcgggagacagagtcaccatcacttgcaaggcgagtcagtctgtgagcaacgacgtagcttggtatcagcagaaaccagggcaatctcctatctgtctcctgatctactatgcatctaatcggtatacaggggtccctgataggttcaccggaagtggatatgggacagatttcactttcaccatcagcaccgtgcaggctgaagatcttgcagtatatttctgtcaacaggattatagtagtcctccgtggactttcggcggagggaccaagttggagatcaga

SEQ ID NO: 165 - protein, 245 aa, Artificial Sequence
  C-002171 W632.1 scFv (humanized)
QVQLQESGPGLVKPSQTLSLTCTVSGFSLTSYGVHWIRQPPGKGLEWIGVIWSGGSTDYNAAFISRVTISVDTSKNQFSLKLSSVTAADTAVYYCARTFTTSTSAWFAYWGQGTLVTVSSGGGGSGGGGSGGGGSGGDIVMTQSPDSLAVSLGERATINCKASQSVSNDVAWYQQKPGQPPKLLIYYASNRYTGVPDRFSGSGSGTDFTLTISSLQAEDVAVYYCQQDYSSPPWTFGGGTKVEIK

SEQ ID NO: 166 - DNA, 735 bp, Artificial Sequence
  C-002171 W632.1 scFv (humanized) DNA
caggtgcagctgcaggagtccggacctggcctagtgaagccctcacagaccctgtccctgacctgcacagtctctggtttctcattaactagctatggtgtacactggattagacagcctccaggaaagggtctggagtggattggagtgatctggagtggtggaagcacagactataatgctgctttcatatccagagtgaccatcagcgtggacacctccaagaaccaattctcccttaaactgagcagtgtgacagctgccgacacagccgtatactactgtgccagaacctttactacgtctacctcggcctggtttgcttactggggccaagggactctggtcactgtctcttcaggcggaggtggaagcggagggggaggatctggcggcggaggaagcggaggcgacatcgtgatgacccagagtccagattccctggctgtgtctctgggagagagagccaccatcaattgcaaggcgagtcagtctgtgagcaacgacgtagcttggtatcagcagaaaccagggcaacctcctaaactcctgatctactatgcatctaatcggtatacaggggtccctgataggttcagcggaagtggatctgggacagatttcactctcaccatcagcagcctgcaggctgaagatgttgcagtatattactgtcaacaggattatagtagtcctccgtggactttcggcggagggaccaaggtggagatcaaa

SEQ ID NO: 167 - protein, 245 aa, Artificial Sequence
  C-002172 W632.2 scFv (humanized)
EVQLLESGGGLVQPGGSLRLSCAASGFSLTSYGVHWVRQAPGKGLEWVSVIWSGGSTDYNAAFISRFTISRDNSKNTLYLQMNSLRAEDTAVYYCARTFTTSTSAWFAYWGQGTLVTVSSGGGGSGGGGSGGGGSGGDIQMTQSPSSLSASVGDRVTITCKASQSVSNDVAWYQQKPGKAPKLLIYYASNRYTGVPSRFSGSGSGTDFTFTISSLQPEDIATYYCQQDYSSPPWTFGGGTKVEIK

SEQ ID NO: 168 - DNA, 735 bp, Artificial Sequence
  C-002172 W632.2 scFv (humanized) DNA
gaggtgcagctgctggagtccggaggtggcctagtgcagcccggagggagcctgcgcctgagctgcgcagcctctggtttctcattaactagctatggtgtacactgggttagacaggctccaggaaagggtctggagtgggttagcgtgatctggagtggtggaagcacagactataatgctgctttcatatccagatttaccatcagccgggacaactccaagaacacactctaccttcaaatgaacagtttgagagctgaagacacagccgtatactactgtgccagaacctttactacgtctacctcggcctggtttgcttactggggccaagggactctggtcactgtctcttcaggcggaggtggaagcggagggggaggatctggcggcggaggaagcggaggcgacatccagatgacccagagtccaagctccctgtctgcgtctgtgggagacagagtcaccatcacttgcaaggcgagtcagtctgtgagcaacgacgtagcttggtatcagcagaaaccagggaaagctcctaaactcctgatctactatgcatctaatcggtatacaggggtccctagtaggttcagcggaagtggatctgggacagatttcactttcaccatcagcagcctgcagcctgaagatattgcaacatattactgtcaacaggattatagtagtcctccgtggactttcggcggagggaccaaggtggagatcaaa

SEQ ID NO: 169 - protein, 245 aa, Artificial Sequence
  C-002173 W632.3 scFv (humanized)
QVQLQESGPGLVKPSETLSLTCTVSGFSLTSYGVHWIRQPPGKGLEWIGVIWSGGSTDYNAAFISRVTISRDTSKNQFSLKLSSVTAADTAVYYCARTFTTSTSAWFAYWGQGTLVTVSSGGGGSGGGGSGGGGSGGDIVMTQTPLSLSVTPGQPASISCKASQSVSNDVAWYLQKPGQSPQLLIYYASNRYTGVPDRFSGSGSGTDFTLKISRVEAEDVGVYYCQQDYSSPPWTFGGGTKVEIK

SEQ ID NO: 170 - DNA, 735 bp, Artificial Sequence
  C-002173 W632.3 scFv (humanized) DNA
caggtgcagctgcaggagtccggacctggcctagtgaagccctcagaaaccctgtccctgacctgcacagtctctggtttctcattaactagctatggtgtacactggattagacagcctccaggaaagggtctggagtggattggagtgatctggagtggtggaagcacagactataatgctgctttcatatccagagtgaccatcagcagggacacctccaagaaccaattctcccttaaactgagcagtgtgacagctgccgacacagccgtatactactgtgccagaacctttactacgtctacctcggcctggtttgcttactggggccaagggactctggtcactgtctcttcaggcggaggtggaagcggagggggaggatctggcggcggaggaagcggaggcgacatcgtgatgacccagactccactttccctgtctgtgactccgggacagccagccagcatcagttgcaaggcgagtcagtctgtgagcaacgacgtagcttggtatctgcagaaaccagggcaatctcctcaactcctgatctactatgcatctaatcggtatacaggggtccctgataggttcagcggaagtggatctgggacagatttcactttgaagatcagcagggtggaggctgaagatgttggagtatattactgtcaacaggattatagtagtcctccgtggactttcggcggagggaccaaggtggagatcaaa

SEQ ID NO: 171 - protein, 245 aa, Artificial Sequence
  C-002174 W632.5 scFv (humanized)
QVQLVESGGGVVQPGRSLRLSCAVSGFSLTSYGMHWVRQAPGKGLEWVAVIWSGGSTDYNAAFISRFTISRDNSKNTLYLQMNSLRAEDTAVYYCAKTFTTSTSAWFAYWGQGTLVTVSSGGGGSGGGGSGGGGSGGEIVLTQSPATLSLSPGERATLSCRASQSVSNDLAWYQQKPGQAPRLLIYYASNRYTGVPDRFSGSGSGTDFTLTISSLEPEDFAVYYCQQDYSSPPWTFGQGTKVEIK

SEQ ID NO: 172 - DNA, 735 bp, Artificial Sequence
  C-002174 W632.5 scFv (humanized) DNA
caggtgcagctggtggagtccggaggtggcgtagtgcagcccggaaggagcctgcgcctgagctgcgcagtctctggtttctcattaactagctatggtatgcactgggttagacaggctccaggaaagggtctggagtgggttgcagtgatctggagtggtggaagcacagactataatgctgctttcatatccagatttaccatcagccgggacaactccaagaacacactctaccttcaaatgaacagtttgagagctgaagacacagccgtatactactgtgccaaaacctttactacgtctacctcggcctggtttgcttactggggccaagggactctggtcactgtctcttcaggcggaggtggaagcggagggggaggatctggcggcggaggaagcggaggcgagatcgtgctgacccagagtccagctaccctgtctctgtctccgggagagagagccaccctcagttgcagggcgagtcagtctgtgagcaacgacctagcttggtatcagcagaaaccagggcaagctcctagactcctgatctactatgcatctaatcggtatacaggggtccctgataggttcagcggaagtggatctgggacagatttcactctcaccatcagcagcctggagcctgaagattttgcagtatattactgtcaacaggattatagtagtcctccgtggactttcggccaagggaccaaggtggagatcaaa

SEQ ID NO: 173 - protein, 245 aa, Artificial Sequence
  C-002175 W632.6 scFv (humanized)
QVQLVESGGGVVQPGRSLRLSCAVSGFSLTSYGMHWVRQAPGKGLEWVAVIWSGGSTDYNAAFISRFTISRDNSKNTLYLQMNSLRAEDTAVYYCARTFTTSTSAWFAYWGQGTLVTVSSGGGGSGGGGSGGGGSGGDIQMTQSPSSLSASVGDRVTITCQASQSVSNDLNWYQQKPGKAPKLLIYYASNRYTGVPDRFSGSGSGTDFTFTISSLQPEDIATYYCQQDYSSPPWTFGGGTKVEIK

SEQ ID NO: 174 - DNA, 735 bp, Artificial Sequence
  C-002175 W632.6 scFv (humanized) DNA
caggtgcagctggtggagtccggaggtggcgtagtgcagcccggaaggagcctgcgcctgagctgcgcagtctctggtttctcattaactagctatggtatgcactgggttagacaggctccaggaaagggtctggagtgggttgcagtgatctggagtggtggaagcacagactataatgctgctttcatatccagatttaccatcagccgggacaactccaagaacacactctaccttcaaatgaacagtttgagagctgaagacacagccgtatactactgtgccagaacctttactacgtctacctcggcctggtttgcttactggggccaagggactctggtcactgtctcttcaggcggaggtggaagcggagggggaggatctggcggcggaggaagcggaggcgacatccagatgacccagagtccaagctccctgtctgcgtctgtgggagacagagtcaccatcacttgccaggcgagtcagtctgtgagcaacgacctaaattggtatcagcagaaaccagggaaagctcctaaactcctgatctactatgcatctaatcggtatacaggggtccctgataggttcagcggaagtggatctgggacagatttcactttcaccatcagcagcctgcagcctgaagatattgcaacatattactgtcaacaggattatagtagtcctccgtggactttcggcggagggaccaaggtggagatcaaa

SEQ ID NO: 175 - DNA, 741 bp, Artificial Sequence
  C-001765 PA2.1 scFv (mouse)
gatgttttgatgacccaaactccactctccctgcctgtcagtcttggagatcaagcctccatctcttgcagatctagtcagagcattgtacatagtaatggaaacacctatttagaatggtacctgcagaaaccaggccagtctccaaagctcctgatctacaaagtttccaaccgattttctggggtcccagacaggttcagtggcagtggatcagggacagatttcacactcaagatcagtagagtggaggctgaggatctgggagtttattactgctttcaaggttcacatgttcctcggacgtccggtggaggcaccaagctggaaatcaaaggcggaggtggaagcggagggggaggatctggcggcggaggaagcggaggccaggtccagctgcagcagtctggacctgagctggtgaagcctggggcttcagtgaggatatcctgcaaggcttctggctacaccttcacaagttaccatatacattgggtgaagcagaggcctggacagggacttgagtggattggatggatttatcctggaaatgttaatactgagtacaatgagaagttcaagggcaaggccacactgactgcagacaaatcgtccagcacagcctacatgcacctcagcagcctgacctctgaggactctgcggtctatttctgtgccagagaggagattacctatgctatggactactggggtcaaggaacctcagtcaccgtgtcctca

SEQ ID NO: 176 - DNA, 741 bp, Artificial Sequence
  C-002159 PA2.1.8 scFv (humanized)
caggtgcagctggtgcagtctggggctgaggtgaagaagcctgggtcctcagtgaaggtttcctgcaaggcttctggatacaccttcactagctatcatatacattgggtgcgccaggcccccggacaagggcttgagtggatgggatggatctaccctggcaatgttaacacagaatataatgagaagttcaagggcaaagccaccattaccgcggacaaatccacgagcacagcctacatggagctgagcagcctgagatctgaagacacggctgtgtattactgtgcgagggaggaaattacctacgctatggactactggggccagggaaccacagtcaccgtgtcctcaggcggaggtggaagcggagggggaggatctggcggcggaggaagcggaggcgagattgtattgacccagagcccaggcaccctgagcctctctccaggagagcgggccaccctcagttgtagatccagtcagagtattgtacacagtaatgggaacacctatttggaatggtatcagcagaaaccaggtcaagccccaagattgctcatctacaaagtctctaacagatttagtggtattccagacaggttcagcggttccggaagtggtactgatttcaccctcacgatctccaggctcgagccagaagatttcgccgtttattactgttttcaaggttcacatgtgccgcgcacattcggtgggggtactaaagtagaaatcaaa

SEQ ID NO: 177 - DNA, 741 bp, Artificial Sequence
  C-002160 PA2.1.9 scFv (humanized)
caggtgcagctggtgcagtctggggctgaggtgaagaagcctgggtcctcagtgaaggtttcctgcaaggcttctggatacaccttcactagctatcatatacattgggtgcgccaggcccccggacaagggcttgagtggatgggatggatctaccctggcaatgttaacacagaatataatgagaagttcaagggcaaagccaccattaccgcggacaaatccacgagcacagcctacatggagctgagcagcctgagatctgaagacacggctgtgtattactgtgcgagggaggaaattacctacgctatggactactggggccagggaaccacagtcaccgtgtcctcaggcggaggtggaagcggagggggaggatctggcggcggaggaagcggaggcgacattgtaatgacccagaccccactcagcctgcccgtcactccaggagagccggccagcatcagttgtagatccagtcagagtattgtacacagtaatgggaacacctatttggaatggtatctgcagaaaccaggtcaatccccacaattgctcatctacaaagtctctaacagatttagtggtgtaccagacaggttcagcggttccggaagtggtactgatttcaccctcaagatctccagggtcgaggcagaagatgtcggcgtttattactgttttcaaggttcacatgtgccgcgcacattcggtgggggtactaaagtagaaatcaaa

SEQ ID NO: 178 - DNA, 741 bp, Artificial Sequence
  C-002161 PA2.1.10 scFv (humanized)
gaggtgcagctggtggagtctgggggtgggctggtgaagcctgggggctcactgaggctttcctgcgcggcttctggatacaccttcactagctatcatatacattgggtgcgccaggcccccggaaaagggcttgagtgggtgggatggatctaccctggcaatgttaacacagaatataatgagaagttcaagggcagattcaccattagcagggacgattccaagaacacactctacctgcagatgaacagcctgaaaactgaagacacggctgtgtattactgtgcgagggaggaaattacctacgctatggactactggggccagggaaccacagtcaccgtgtcctcaggcggaggtggaagcggagggggaggatctggcggcggaggaagcggaggcgacattcaaatgacccagagcccatccagcctgagcgcatctgtaggtgaccgggtcaccatcacttgtagatccagtcagagtattgtacacagtaatgggaacacctatttggaatggtatcagcagaaaccaggtaaagccccaaaattgctcatctacaaagtctctaacagatttagtggtgtaccaagcaggttcagcggttccggaagtggtactgatttcaccctcacgatctcctctctccagccagaagatttcgccacttattactgttttcaaggttcacatgtgccgcgcacattcggtgggggtactaaagtagaaatcaaa

SEQ ID NO: 179 - DNA, 741 bp, Artificial Sequence
  C-002162 PA2.1.14 scFv (humanized)
caggtgcagctggtgcagtctggggctgaggtgaagaagcctgggtcctcagtgaaggtttcctgcaaggcttctggatacaccttcactagctatcatatacattgggtgcgccaggcccccggacaagggcttgagtggatcggatggatctaccctggcaatgttaacacagaatataatgagaagttcaagggcaaagccaccattaccgcggacgaatccacgaacacagcctacatggagctgagcagcctgagatctgaagacacggctgtgtattactgtgcgagggaggaaattacctacgctatggactactggggccagggaaccctggtcaccgtgtcctcaggcggaggtggaagcggagggggaggatctggcggcggaggaagcggaggcgacattcaaatgacccagagcccatccaccctgagcgcatctgtaggtgaccgggtcaccatcacttgtagatccagtcagagtattgtacacagtaatgggaacacctatttggaatggtatcagcagaaaccaggtaaagccccaaaattgctcatctacaaagtctctaacagatttagtggtgtaccagccaggttcagcggttccggaagtggtactgaattcaccctcacgatctcctctctccagccagatgatttcgccacttattactgttttcaaggttcacatgtgccgcgcacattcggtcagggtactaaagtagaagtcaaa

SEQ ID NO: 180 - DNA, 741 bp, Artificial Sequence
  C-002163 PA2.1.18 scFv (humanized)
caggtgcagctggtgcagtctggggctgaggtgaagaagcctgggtcctcagtgaaggtttcctgcaaggcttctggatacaccttcactagctatcatatgcattgggtgcgccaggcccccggacaagggcttgagtggatcggatacatctaccctggcaatgttaacacagaatataatgagaagttcaagggcaaagccacccttaccgcggacaaatccacgaacacagcctacatggagctgagcagcctgagatctgaagacacggctgtgtatttctgtgcgagggaggaaattacctacgctatggactactggggccagggaaccctggtcaccgtgtcctcaggcggaggtggaagcggagggggaggatctggcggcggaggaagcggaggcgacgttcaaatgacccagagcccatccaccctgagcgcatctgtaggtgaccgggtcaccatcacttgtagctccagtcagagtattgtacacagtaatgggaacacctatatggaatggtatcagcagaaaccaggtaaagccccaaaattgctcatctacaaagtctctaacagatttagtggtgtaccagacaggttcagcggttccggaagtggtactgaattcaccctcacgatctcctctctccagccagatgatttcgccacttattactgtcatcaaggttcacatgtgccgcgcacattcggtcagggtactaaagtagaagtcaaa

SEQ ID NO: 181 - DNA, 741 bp, Artificial Sequence
  C-002164 BB7.2 scFv (mouse)
caggtgcagctgcagcagtctgggcctgagctggtgaagcctggggcctcagtgaagatgtcctgcaaggcttctggatacaccttcactagctatcatatccagtgggtgaagcagaggcctggacaagggcttgagtggatcggatggatctaccctggcgatggtagtacacagtataatgagaagttcaagggcaaaaccacccttaccgcggacaaatcctccagcacagcctacatgttgctgagcagcctgacctctgaagactctgctatctatttctgtgcgagggaggggacctactacgctatggactactggggccagggaacctcagtcaccgtgtcctcaggcggaggtggaagcggagggggaggatctggcggcggaggaagcggaggcgatgttttgatgacccagactccactctccctgcctgtctctcttggagaccaagtctccatctcttgtagatccagtcagagtattgtacacagtaatgggaacacctatttagaatggtatctgcagaaaccaggtcagtctccaaagttgctcatctacaaagtctctaacagatttagtggtgtaccagacaggttcagcggttccggaagtggtactgatttcaccctcaagatctcgagagtggaggctgaggatctgggagtttattactgttttcaaggttcacatgtgccgcgcacattcggtggaggtactaaactggaaatcaaa

SEQ ID NO: 182 - DNA, 741 bp, Artificial Sequence
  C-002165 BB7.2.1 scFv (humanized)
cagctgcagctgcaggagtctgggcccgggctggtgaagccttcggaaacgctgagcctcacctgcacggtttctggatacaccttcaccagctatcatatccagtggatccgacagccccctggaaaagggcttgagtggatcggatggatctaccctggcgatggttcaacacagtacaatgagaagttcaagggcagagccacgattagcgtggacacatccaagaaccaattctccctgaacctggacagcgtgagtgctgcggacacggccatttattactgtgcgagagagggaacttactacgctatggactactggggcaaagggagcacggtcaccgtgtcctcaggcggaggtggaagcggagggggaggatctggcggcggaggaagcggaggcgacatccagatgacccagagcccaagctccctgagtgcgtccgtgggcgaccgcgtgaccatcacttgcagatcctctcagtccatcgtgcactccaacggcaacacgtacctcgagtggtaccagcagaagcccgggaaggccccgaaactgctcatctacaaggtgagcaaccggttctccggcgtccccagccgcttctcagggtccggctcggggacggatttcaccttcacgattagcagcttgcagcccgaagacatcgccacgtactactgctttcagggaagtcacgtgccgcgtaccttcgggccgggcacgaaagtggatattaag

SEQ ID NO: 183 - DNA, 741 bp, Artificial Sequence
  C-002166 BB7.2.2 scFv (humanized)
gaggtgcagctggtgcagtctggggccgagctgaagaagcctgggtcctcggtgaaggtgtcctgcaaggcttctggatacaccttcaccagctatcatatccagtgggtaaaacaggcccctggacaagggcttgagtggatcggatggatctaccctggcgatggttcaacacagtacaatgagaagttcaagggcaaagccacgcttaccgtggacaaatccacgaacacagcctacatggagctgagcagcctgagatctgaggacacggccgtatattactgtgcgagagagggaacttactacgctatggactactggggccaagggaccctggtcaccgtgtcctcaggcggaggtggaagcggagggggaggatctggcggcggaggaagcggaggcgacatccagatgacccagagcccatccaccctgagtgcgtccgtgggcgaccgcgtgaccatcacttgcagatcctctcagtccatcgtgcactccaacggcaacacgtacctcgagtggtaccagcagaagcccgggaaggccccgaaactgctcatctacaaggtgagcaaccggttctccggcgtccccagccgcttctcagggtccggctcggggacggatttcaccctcacgattagcagcttgcagcccgatgacttcgccacgtactactgctttcagggaagtcacgtgccgcgtaccttcgggcagggcacgaaagtggaagttaag

SEQ ID NO: 184 - DNA, 741 bp, Artificial Sequence
  C-002167 BB7.2.3 scFv (humanized)
caggtgcagctggtgcagtctggggccgaggtgaagaagcctgggtcctcggtgaaggtgtcctgcaaggcttctggatacaccttcaccagctatcatatccagtgggtacgacaggcccctggacaagggcttgagtggatgggatggatctaccctggcgatggttcaacacagtacaatgagaagttcaagggcagagtcacgattaccgcggacaaatccacgagcacagcctacatggagctgagcagcctgagatctgaggacacggccgtatattactgtgcgagagagggaacttactacgctatggactactggggccaagggaccacggtcaccgtgtcctcaggcggaggtggaagcggagggggaggatctggcggcggaggaagcggaggcgagatcgtcctgacccagagcccagggaccctgagtttgtccccgggcgagcgcgcgaccctcagttgcagatcctctcagtccatcgtgcactccaacggcaacacgtacctcgagtggtaccagcagaagcccgggcaggccccgcgactgctcatctacaaggtgagcaaccggttctccggcatccccgaccgcttctcagggtccggctcggggacggatttcaccctcacgattagccgcttggagcccgaagacttcgccgtgtactactgctttcagggaagtcacgtgccgcgtaccttcggggggggcacgaaagtggaaattaag

SEQ ID NO: 185 - DNA, 741 bp, Artificial Sequence
  C-002168 BB7.2.5 scFv (humanized)
caggtgaccctgaagcagtctggggccgaggtgaagaagcctgggtcctcggtgaaggtgtcctgcacggcttctggatacaccttcaccagctatcatgtcagctgggtacgacaggcccctggacaagggcttgagtggttgggaaggatctaccctggcgatggttcaacacagtacaatgagaagttcaagggcaaagtcacgattaccgcggacaaatccatggacacatccttcatggagctgaccagcctgacatctgaggacacggccgtatattactgtgcgagagagggaacttactacgctatggacctctggggccaagggaccctggtcaccgtgtcctcaggcggaggtggaagcggagggggaggatctggcggcggaggaagcggaggcgagatcgtcctgacccagagcccagggaccctgagtttgtccccgggcgagcgcgcgaccctcagttgcagatcctctcagtccatcgtgcactccaacggcaacacgtacctcgcgtggtaccagcagaagcccgggcaggccccgcgactgctcatctccaaggtgagcaaccggttctccggcgtccccgaccgcttctcagggtccggctcggggacggatttcaccctcacgattagccgcttggagcccgaagacttcgccgtgtactactgccaacagggaagtcacgtgccgcgtaccttcggggggggcacgaaagtggaaattaag

SEQ ID NO: 186 - DNA, 741 bp, Artificial Sequence
  C-002169 BB7.2.6 scFv (humanized)
caggtgcagctggtgcagtctggggccgaggtgaagaagcctggggcctcggtgaaggtgtcctgcaaggcttctggatacaccttcaccagctatcatatgcactgggtacgacaggcccctggacaaaggcttgagtggatgggatggatctaccctggcgatggttcaacacagtacaatgagaagttcaagggcaaagtcacgattacccgggacacatccgcgagcacagcctacatggagctgagcagcctgagatctgaggacacggccgtatattactgtgcgagagagggaacttactacgctatggactactggggccaagggaccctggtcaccgtgtcctcaggcggaggtggaagcggagggggaggatctggcggcggaggaagcggaggcgacatcgtcatgacccagaccccactgtccctgcctgtgaccccgggcgagcccgcgagcatcagttgcagatcctctcagtccatcgtgcactccaacggcaacacgtacctcgactggtacctgcagaagcccgggcagtccccgcaactgctcatctacaaggtgagcaaccggttctccggcgtccccgaccgcttctcagggtccggctcggggacggatttcaccctcaagattagccgcgtggaggccgaagacgtcggcgtgtactactgcatgcagggaagtcacgtgccgcgtaccttcggggggggcacgaaagtggaaattaag

SEQ ID NO: 187 - protein, 9 aa, Artificial Sequence
  HA-1 variant H peptide
VLHDDLLEA

SEQ ID NO: 188 - protein, 19 aa, Artificial Sequence
  P2A self-cleaving polypeptide
ATNFSLLKQAGDVEENPGP

SEQ ID NO: 189 - protein, 608 aa, Artificial Sequence
  C-003754 KP7 HA-1H TCRalpha T48C P2A KP7 HA-1H TCRbeta S57C
MVKIRQFLLAILWLQLSCVSAAKNEVEQSPQNLTAQEGEFITINCSYSVGISALHWLQQHPGGGIVSLFMLSSGKKKHGRLIATINIQEKHSSLHITASHPRDSAVYICAVRSVSGAGSYQLTFGKGTKLSVIPNIQNPDPAVYQLRDSKSSDKSVCLFTDFDSQTNVSQSKDSDVYITDKCVLDMRSMDFKSNSAVAWSNKSDFACANAFNNSIIPEDTFFPSPESSCDVKLVEKSFETDTNLNFQNLSVIGFRILLLKVAGFNLLMTLRLWSSGSGATNFSLLKQAGDVEENPGPMGTSLLCWMALCLLGADHADTGVSQNPRHKITKRGQNVTFRCDPISEHNRLYWYRQTLGQGPEFLTYFQNEAQLEKSRLLSDRFSAERPKGSFSTLEIQRTEQGDSAMYLCASSIDSFNEQFFGPGTRLTVLEDLKNVFPPEVAVFEPSEAEISHTQKATLVCLATGFYPDHVELSWWVNGKEVHSGVCTDPQPLKEQPALNDSRYCLSSRLRVSATFWQNPRNHFRCQVQFYGLSENDEWTQDRAKPVTQIVSAEAWGRADCGFTSESYQQGVLSATILYEILLGKATLYAVLVSALVLMAMVKRKDSRG

SEQ ID NO: 190 - DNA, 1827 bp, Artificial Sequence
  C-003754 KP7 HA-1H TCRalpha T48C P2A KP7 HA-1H TCRbeta S57C
atggtgaagatccggcaatttttgttggctattttgtggcttcagctaagctgtgtaagtgccgccaaaaatgaagtggagcagagtcctcagaacctgactgcccaggaaggagaatttatcacaatcaactgcagttactcggtaggaataagtgccttacactggctgcaacagcatccaggaggaggcattgtttccttgtttatgctgagctcagggaagaagaagcatggaagattaattgccacaataaacatacaggaaaagcacagctccctgcacatcacagcctcccatcccagagactctgccgtctacatctgtgctgtcagaagcgtgtccggggccggctcctaccagctcacctttgggaaggggaccaaattatcagtcattccaaatatccagaaccctgaccctgccgtgtaccagctgagagactctaaatccagtgacaagtctgtctgcctattcaccgattttgattctcaaacaaatgtgtcacaaagtaaggattctgatgtgtatatcacagacaaatgtgtgctagacatgaggtctatggacttcaagagcaacagtgctgtggcctggagcaacaaatctgactttgcatgtgcaaacgccttcaacaacagcattattccagaagacaccttcttccccagcccagaaagttcctgtgatgtcaagctggtcgagaaaagctttgaaacagatacgaacctaaactttcaaaacctgtcagtgattgggttccgaatcctcctcctgaaagtggccgggtttaatctgctcatgacgctgcggctgtggtccagcggatccggagccaccaacttcagcctgctgaagcaggccggcgacgtggaggagaaccccggccccatgggcaccagcctcctctgctggatggccctgtgtctcctgggggcagatcacgcagatactggagtctcccagaaccccagacacaagatcacaaagaggggacagaatgtaactttcaggtgtgatccaatttctgaacacaaccgcctttattggtaccgacagaccctggggcagggcccagagtttctgacttacttccagaatgaagctcaactagaaaaatcaaggctgctcagtgatcggttctctgcagagaggcctaagggatctttctccaccttggagatccagcgcacagagcagggggactcggccatgtatctctgtgccagcagcatcgactccttcaacgagcagttcttcgggccgggcaccaggctcacggtcctcgaggacctgaaaaacgtgttcccacccgaggtcgctgtgtttgagccatcagaagcagagatctcccacacccaaaaggccacactggtgtgcctggccacaggcttctaccccgaccacgtggagctgagctggtgggtgaatgggaaggaggtgcacagtggggtctgcacagacccgcagcccctcaaggagcagcccgccctcaatgactccagatactgcctgagcagccgcctgagggtgtcggccaccttctggcagaacccccgcaaccacttccgctgtcaagtccagttctacgggctctcggagaatgacgagtggacccaggatagggccaaacctgtcacccagatcgtcagcgccgaggcctggggtagagcagactgtggcttcacctccgagtcttaccagcaaggggtcctgtctgccaccatcctctatgagatcttgctagggaaggccaccttgtatgccgtgctggtcagtgccctcgtgctgatggccatggtcaagagaaaggattccagaggctag

SEQ ID NO: 191 - protein, 440 aa, Artificial Sequence
  C-003755 KP7 HA-1H FTCRalpha LIR1 TICD
MVKIRQFLLAILWLQLSCVSAAKNEVEQSPQNLTAQEGEFITINCSYSVGISALHWLQQHPGGGIVSLFMLSSGKKKHGRLIATINIQEKHSSLHITASHPRDSAVYICAVRSVSGAGSYQLTFGKGTKLSVIPNIQNPDPAVYQLRDSKSSDKSVCLFTDFDSQTNVSQSKDSDVYITDKCVLDMRSMDFKSNSAVAWSNKSDFACANAFNNSIIPEDTFFPSPESSCDVKLVEKSFETDTNLNFQNLSVVIGILVAVILLLLLLLLLFLILRHRRQGKHWTSTQRKADFQHPAGAVGPEPTDRGLQWRSSPAADAQEENLYAAVKHTQPEDGVEMDTRSPHDEDPQAVTYAEVKHSRPRREMASPPSPLSGEFLDTKDRQAEEDRQMDTEAAASEAPQDVTYAQLHSLTLRREATEPPPSQEGPSPAVPSIYATLAIH

SEQ ID NO: 192 - DNA, 1279 bp, Artificial Sequence
  C-003755 KP7 HA-1H FTCRalpha LIR1 TICD
atggtgaagatccggcaatttttgttggctattttgtggcttcagctaagctgtgtaagtgccgccaaaaatgaagtggagcagagtcctcagaacctgactgcccaggaaggagaatttatcacaatcaactgcagttactcggtaggaataagtgccttacactggctgcaacagcatccaggaggaggcattgtttccttgtttatgctgagctcagggaagaagaagcatggaagattaattgccacaataaacatacaggaaaagcacagctccctgcacatcacagcctcccatcccagagactctgccgtctacatctgtgctgtcagaagcgtgtccggggccggctcctaccagctcacctttgggaaggggaccaaattatcagtcattccaaatatccagaaccctgaccctgccgtgtaccagctgagagactctaaatccagtgacaagtctgtctgcctattcaccgattttgattctcaaacaaatgtgtcacaaagtaaggattctgatgtgtatatcacagacaaatgtgtgctagacatgaggtctatggacttcaagagcaacagtgctgtggcctggagcaacaaatctgactttgcatgtgcaaacgccttcaacaacagcattattccagaagacaccttcttccccagcccagaaagttcctgtgatgtcaagctggtcgagaaaagctttgaaacagatacgaacctaaactttcaaaacctgtcagttgtgatcggcatcttggtggccgtcatcctactgctcctcctcctcctcctcctcttcctcatcctccgacatcgacgtcagggcaaacactggacatcgacccagagaaaggctgatttccaacatcctgcaggggctgtggggccagagcccacagacagaggcctgcagtggaggtccagcccagctgccgatgcccaggaagaaaacctctatgctgccgtgaagcacacacagcctgaggatggggtggagatggacactcggagcccacacgatgaagacccccaggcagtgacgtatgccgaggtgaaacactccagacctaggagagaaatggcctctcctccttccccactgtctggggaattcctggacacaaaggacagacaggcggaagaggacaggcagatggacactgaggctgctgcatctgaagccccccaggatgtgacctacgcccagctgcacagcttgaccctcagacgggaggcaactgagcctcctccatcccaggaagggccct

SEQ ID NO: 193 - protein, 466 aa, Artificial Sequence
  C-003756 KP7 HA-1H FTCRbeta  LIR1 TICD
MGTSLLCWMALCLLGADHADTGVSQNPRHKITKRGQNVTFRCDPISEHNRLYWYRQTLGQGPEFLTYFQNEAQLEKSRLLSDRFSAERPKGSFSTLEIQRTEQGDSAMYLCASSIDSFNEQFFGPGTRLTVLEDLKNVFPPEVAVFEPSEAEISHTQKATLVCLATGFYPDHVELSWWVNGKEVHSGVCTDPQPLKEQPALNDSRYCLSSRLRVSATFWQNPRNHFRCQVQFYGLSENDEWTQDRAKPVTQIVSAEAWGRADCGFTSESYQQGVLSVVIGILVAVILLLLLLLLLFLILRHRRQGKHWTSTQRKADFQHPAGAVGPEPTDRGLQWRSSPAADAQEENLYAAVKHTQPEDGVEMDTRSPHDEDPQAVTYAEVKHSRPRREMASPPSPLSGEFLDTKDRQAEEDRQMDTEAAASEAPQDVTYAQLHSLTLRREATEPPPSQEGPSPAVPSIYATLAIH

SEQ ID NO: 194 - DNA, 1401 bp, Artificial Sequence
  C-003756 KP7 HA-1H FTCRbeta  LIR1 TICD
atgggcaccagcctcctctgctggatggccctgtgtctcctgggggcagatcacgcagatactggagtctcccagaaccccagacacaagatcacaaagaggggacagaatgtaactttcaggtgtgatccaatttctgaacacaaccgcctttattggtaccgacagaccctggggcagggcccagagtttctgacttacttccagaatgaagctcaactagaaaaatcaaggctgctcagtgatcggttctctgcagagaggcctaagggatctttctccaccttggagatccagcgcacagagcagggggactcggccatgtatctctgtgccagcagcatcgactccttcaacgagcagttcttcgggccgggcaccaggctcacggtcctcgaggacctgaaaaacgtgttcccacccgaggtcgctgtgtttgagccatcagaagcagagatctcccacacccaaaaggccacactggtgtgcctggccacaggcttctaccccgaccacgtggagctgagctggtgggtgaatgggaaggaggtgcacagtggggtctgcacagacccgcagcccctcaaggagcagcccgccctcaatgactccagatactgcctgagcagccgcctgagggtgtcggccaccttctggcagaacccccgcaaccacttccgctgtcaagtccagttctacgggctctcggagaatgacgagtggacccaggatagggccaaacctgtcacccagatcgtcagcgccgaggcctggggtagagcagactgtggcttcacctccgagtcttaccagcaaggggtcctgtctgttgtgatcggcatcttggtggccgtcatcctactgctcctcctcctcctcctcctcttcctcatcctccgacatcgacgtcagggcaaacactggacatcgacccagagaaaggctgatttccaacatcctgcaggggctgtggggccagagcccacagacagaggcctgcagtggaggtccagcccagctgccgatgcccaggaagaaaacctctatgctgccgtgaagcacacacagcctgaggatggggtggagatggacactcggagcccacacgatgaagacccccaggcagtgacgtatgccgaggtgaaacactccagacctaggagagaaatggcctctcctccttccccactgtctggggaattcctggacacaaaggacagacaggcggaagaggacaggcagatggacactgaggctgctgcatctgaagccccccaggatgtgacctacgcccagctgcacagcttgaccctcagacgggaggcaactgagcctcctccatcccaggaagggccctctccagctgtgcccagcatctacgccactctggccatccactag

SEQ ID NO: 195 - protein, 250 aa, Artificial Sequence
  HA-1H TCR alpha
MVKIRQFLLAILWLQLSCVSAAKNEVEQSPQNLTAQEGEFITINCSYSVGISALHWLQQHPGGGIVSLFMLSSGKKKHGRLIATINIQEKHSSLHITASHPRDSAVYICAVRSVSGAGSYQLTFGKGTKLSVIPNIQNPDPAVYQLRDSKSSDKSVCLFTDFDSQTNVSQSKDSDVYITDKCVLDMRSMDFKSNSAVAWSNKSDFACANAFNNSIIPEDTFFPSPESSCDVKLVEKSFETDTNLNFQNLS

SEQ ID NO: 196 - protein, 276 aa, Artificial Sequence
  HA-1(H) TCRbeta
MGTSLLCWMALCLLGADHADTGVSQNPRHKITKRGQNVTFRCDPISEHNRLYWYRQTLGQGPEFLTYFQNEAQLEKSRLLSDRFSAERPKGSFSTLEIQRTEQGDSAMYLCASSIDSFNEQFFGPGTRLTVLEDLKNVFPPEVAVFEPSEAEISHTQKATLVCLATGFYPDHVELSWWVNGKEVHSGVCTDPQPLKEQPALNDSRYCLSSRLRVSATFWQNPRNHFRCQVQFYGLSENDEWTQDRAKPVTQIVSAEAWGRADCGFTSESYQQGVLS

SEQ ID NO: 197 - DNA, 750 bp, Artificial Sequence
  HA-1H TCR alpha
atggtgaagatccggcaatttttgttggctattttgtggcttcagctaagctgtgtaagtgccgccaaaaatgaagtggagcagagtcctcagaacctgactgcccaggaaggagaatttatcacaatcaactgcagttactcggtaggaataagtgccttacactggctgcaacagcatccaggaggaggcattgtttccttgtttatgctgagctcagggaagaagaagcatggaagattaattgccacaataaacatacaggaaaagcacagctccctgcacatcacagcctcccatcccagagactctgccgtctacatctgtgctgtcagaagcgtgtccggggccggctcctaccagctcacctttgggaaggggaccaaattatcagtcattccaaatatccagaaccctgaccctgccgtgtaccagctgagagactctaaatccagtgacaagtctgtctgcctattcaccgattttgattctcaaacaaatgtgtcacaaagtaaggattctgatgtgtatatcacagacaaatgtgtgctagacatgaggtctatggacttcaagagcaacagtgctgtggcctggagcaacaaatctgactttgcatgtgcaaacgccttcaacaacagcattattccagaagacaccttcttccccagcccagaaagttcctgtgatgtcaagctggtcgagaaaagctttgaaacagatacgaacctaaactttcaaaacctgtca

SEQ ID NO: 198 - DNA, 828 bp, Artificial Sequence
  HA-1H TCRbeta
atgggcaccagcctcctctgctggatggccctgtgtctcctgggggcagatcacgcagatactggagtctcccagaaccccagacacaagatcacaaagaggggacagaatgtaactttcaggtgtgatccaatttctgaacacaaccgcctttattggtaccgacagaccctggggcagggcccagagtttctgacttacttccagaatgaagctcaactagaaaaatcaaggctgctcagtgatcggttctctgcagagaggcctaagggatctttctccaccttggagatccagcgcacagagcagggggactcggccatgtatctctgtgccagcagcatcgactccttcaacgagcagttcttcgggccgggcaccaggctcacggtcctcgaggacctgaaaaacgtgttcccacccgaggtcgctgtgtttgagccatcagaagcagagatctcccacacccaaaaggccacactggtgtgcctggccacaggcttctaccccgaccacgtggagctgagctggtgggtgaatgggaaggaggtgcacagtggggtctgcacagacccgcagcccctcaaggagcagcccgccctcaatgactccagatactgcctgagcagccgcctgagggtgtcggccaccttctggcagaacccccgcaaccacttccgctgtcaagtccagttctacgggctctcggagaatgacgagtggacccaggatagggccaaacctgtcacccagatcgtcagcgccgaggcctggggtagagcagactgtggcttcacctccgagtcttaccagcaaggggtcctgtct

SEQ ID NO: 199 - protein, 13 aa, Artificial Sequence
  NY-ESO/TRBV5-8*01/TRBJ2-7*01 binding CDR3
CASSLGLGYEQYF

SEQ ID NO: 200 - protein, 20 aa, Artificial Sequence
  NY-ESO/TRBV5-8*01/TRBD2*02/TRBJ2-1*01 binding CDR3
CASSLGGPRGLAGLRGDEQF

SEQ ID NO: 201 - protein, 12 aa, Artificial Sequence
  NY-ESO/TRBV5-8*01/TRBD2*01/TRBJ2-1*01 binding CDR3
CASSLRRDNEQF

SEQ ID NO: 202 - protein, 19 aa, Artificial Sequence
  MAGE-A3/TRBV5-8*01/TRBD1*01/TRBJ2-3*01 binding CDR3
CASSLEVLLGADFPDTQYF

SEQ ID NO: 203 - protein, 18 aa, Artificial Sequence
  MAGE-A3/TRBV5-8*01/TRBD2*02/TRBJ2-1*01 binding CDR3
CASSFPAGHGADLDNEQF

SEQ ID NO: 204 - protein, 14 aa, Artificial Sequence
  MAGE-A3/TRBV5-8*01/TRBD1*01/TRBJ2-1*01 binding CDR3
CASSEITGRIGEQF

SEQ ID NO: 205 - protein, 18 aa, Artificial Sequence
  MAGE-A3/TRBV5-8*01/TRBD1*01/TRBJ2-1*01 binding CDR3
CASSLGGDELGADGNEQF

SEQ ID NO: 206 - protein, 241 aa, Artificial Sequence
  C-1761/C-266 (NY-ESO -1 scFv)
DIQMTQSPSSLSASVGDRVTITCRASQSISSYLNWYQQKPGKAPKLLIYAASSLQSGVPSRFSGSGSGTDFTLTISSLQPEDFATYYCQQSYSTPLTFGGGTKVEIKGGGGSGGGGSGGGGSGGEVQLVESGGGLVQPGGSLRLSCAASGFTVYDYMSWVRQAPGKGLEWVSVIYSGGSTYYADSVKGRFTISRDNSKNTLYLQMNSLRAEDTAVYYCARYSYYYYYMDVWGKGTTVTVSS

SEQ ID NO: 207 - DNA, 723 bp, Artificial Sequence
  C-1761/C-266 (NY-ESO -1 scFv)
gacatccagatgacccagtctccatcctccctgtctgcatctgtaggagacagagtcaccatcacttgccgggcaagtcagagcattagcagctatttaaattggtatcagcagaaaccagggaaagcccctaagctcctgatctatgctgcatccagtttgcaaagtggggtcccatcaaggttcagtggcagtggatctgggacagatttcactctcaccatcagcagtctgcaacctgaagattttgcaacttactactgtcaacagagttacagtacccctctcactttcggcggcggaacaaaggtggagatcaagggcggaggtggaagcggagggggaggatctggcggcggaggaagcggaggcgaagtgcagctggtggaaagcggcggaggcctggtgcagcctggcggcagcctgagactgtcttgcgccgccagcggcttcaccgtgtacgactacatgagctgggtccgccaggcccctggcaagggactggaatgggtgtccgtgatctacagcggcggcagcacctactacgccgacagcgtgaagggtcgattcaccatcagccgggacaacagcaagaacaccctgtacctgcagatgaacagcctgcgggccgaggacaccgccgtgtattactgtgcgaggtactcctactactactactacatggacgtctggggcaaagggaccacggtcaccgtgtcctca

SEQ ID NO: 208 - protein, 244 aa, Artificial Sequence
  C-3393/C-563 (MAGE-A3 pep1)
QVQLQESGPGLVKPSDTLSLTCAVSGYSISSSNWWGWIRQPPGKGLEWIGYIYYSGSTYYNPSLKSRVTMSVDTSKNQFSLKLSSVTAVDTAVYYCARIPFGDWWYFDLWGRGTLVTVSSGGGGSGGGGSGGGGSGGDIQMTQSPSSLSASVGDRVTITCRASQSISSYLNWYQQKPGKAPKLLIYAASSLQSGVPSRFSGSGSGTDFTLTISSLQPEDFATYYCQQSYSFVLTFGGGTKVEIK

SEQ ID NO: 209 - DNA, 732 bp, Artificial Sequence
  C-3393/C-563 (MAGE-A3 pep1)
caggtgcagctgcaggaaagcggccctggcctggtgaaacccagcgacaccctgagcctgacctgcgccgtgtccggctacagcatcagcagcagcaattggtggggctggatcagacagccccctggcaagggcctggaatggatcggctacatctactacagcggcagcacctactacaaccccagcctgaagtccagagtgaccatgagcgtggacaccagcaagaaccagttcagcctgaagctgagcagcgtgaccgccgtcgataccgctgtgtattactgtgcgagaataccctttggggattggtggtacttcgatctctggggccgtggcaccctggtcactgtgtcctcaggcggaggtggaagcggagggggaggatctggcggcggaggaagcggaggcgacatccagatgacccagagccccagcagcctgagcgccagcgtgggcgacagagtgaccatcacctgtcgggccagccagtcgatcagcagctacctgaactggtatcagcagaagcccggcaaggcccccaagctgctgatctacgccgccagctccctgcagagcggcgtgccaagcagattcagcggcagcggctccggcaccgacttcaccctgaccatcagcagcctgcagcccgaggacttcgccacctactactgccagcagagttacagtttcgttctcactttcggcggagggaccaaggtggagatcaaa

SEQ ID NO: 210 - protein, 248 aa, Artificial Sequence
  C-3394/C-582 (MAGE-A3 pep1)
QVQLVQSGAEVKKPGASVKVSCKVSGYTLTELSMHWVRQAPGKGLEWMGGFDPEDGETIYAQKFQGRVTMTEDTSTDTAYMELSSLRSEDTAVYYCATDLYSSSWYCDAFDIWGQGTMVTVSSGGGGSGGGGSGGGGSGGDIQMTQSPSSLSASVGDRVTITCRASQSISSYLNWYQQKPGKAPKLLIYAASSLQSGVPSRFSGSGSGTDFTLTISSLQPEDFATYYCQQSWASTPLTFGGGTKVEIK

SEQ ID NO: 211 - DNA, 744 bp, Artificial Sequence
  C-3394/C-582 (MAGE-A3 pep1)
caggtgcagctggtgcagtctggcgccgaagtgaagaaacctggcgcctccgtgaaggtgtcctgcaaggtgtccggctacaccctgaccgagctgtcgatgcactgggtccgccaggcacctggcaagggactggaatggatgggcggctttgaccccgaggacggcgagacaatctacgcccagaaattccagggcagagtgaccatgaccgaggacaccagcaccgacaccgcctacatggaactgagcagcctgcggagcgaggacaccgctgtgtattactgtgcaacagatctgtatagcagcagctggtactgtgatgcttttgatatctggggccaagggacaatggtcaccgtgtcctcaggcggaggtggaagcggagggggaggatctggcggcggaggaagcggaggcgacatccagatgacccagagccccagcagcctgagcgccagcgtgggcgacagagtgaccatcacctgtcgggccagccagtcgatcagcagctacctgaactggtatcagcagaagcccggcaaggcccccaagctgctgatctacgccgccagctccctgcagagcggcgtgccaagcagattcagcggcagcggctccggcaccgacttcaccctgaccatcagcagcctgcagcccgaggacttcgccacctactactgccagcagagttgggccagcacccctctcactttcggcggagggaccaaggtggagatcaaa

SEQ ID NO: 212 - protein, 245 aa, Artificial Sequence
  C-3390/C-2387 (HPV E6 pep1)
EVQLVESGGGLVQPGGSLRLSCAASGFTFSSYWMHWVRQAPGKGLVWVSRINSDGSSTSYADSVKGRFTISRDNAKNTLYLQMNSLRAEDTAVYYCARENGVVKWYFDLWGRGTLVTVSSGGGGSGGGGSGGGGSGGDIQMTQSPSSLSASVGDRVTITCRASQSISSYLNWYQQKPGKAPKLLIYAASSLQSGVPSRFSGSGSGTDFTLTISSLQPEDFATYYCQQSYSTPLFPFGGGTKVEIK

SEQ ID NO: 213 - DNA, 735 bp, Artificial Sequence
  C-3390/C-2387 (HPV E6 pep1)
gaagtgcagctggtggaaagcggcggaggcctggtgcagcctggcggcagcctgagactgtcttgcgccgccagcggcttcaccttcagcagctactggatgcactgggtccgccaggcccctggcaagggactggtctgggtgtctcgaatcaacagcgacggcagcagcaccagctacgccgacagcgtgaagggccggttcaccatcagccgggacaacgccaagaacaccctgtacctgcagatgaacagcctgcgggccgaggacaccgccgtgtattactgtgccagggagaacggcgtggtgaagtggtacttcgacctgtggggccgtggcaccctggtcactgtgtcctcaggcggaggtggaagcggagggggaggatctggcggcggaggaagcggaggcgacatccagatgacccagagccccagcagcctgagcgccagcgtgggcgacagagtgaccatcacctgtcgggccagccagtcgatcagcagctacctgaactggtatcagcagaagcccggcaaggcccccaagctgctgatctacgccgccagctccctgcagagcggcgtgccaagcagattcagcggcagcggctccggcaccgacttcaccctgaccatcagcagcctgcagcccgaggacttcgccacctactactgccagcagagttacagtacccctctctttcccttcggcggagggaccaaggtggagatcaaa

SEQ ID NO: 214 - protein, 247 aa, Artificial Sequence
  C-3391/C-1043 (HPV E6 pep1)
EVQLVESGGGLVQPGRSLRLSCAASGFTFDDYAMHWVRQAPGKGLEWVSGISWNSGSIGYADSVKGRFTISRDNAKNSLYLQMNSLRAEDTALYYCAKDGRGSPFYGGAFDIWGQGTMVTVSSGGGGSGGGGSGGGGSGGDIQMTQSPSSLSASVGDRVTITCRASQSISSYLNWYQQKPGKAPKLLIYAASSLQSGVPSRFSGSGSGTDFTLTISSLQPEDFATYYCQQSYSTPLTFGGGTKVEIK

SEQ ID NO: 215 - DNA, 741 bp, Artificial Sequence
  C-3391/C-1043 (HPV E6 pep1)
gaagtgcagctggtggaaagcggcggaggcctggtgcagcccggtcgaagcctgagactgagctgcgccgccagcggcttcacctttgacgactacgccatgcactgggtccgccaggcccctggcaagggactggaatgggtgtccggcatcagctggaacagcggcagcatcggctacgccgacagcgtgaagggccggttcaccatcagccgggacaacgccaagaacagcctgtacctgcagatgaacagcctgcgggccgaggacaccgccttgtattactgtgccaaggacggcaggggctcccccttctacggcggcgccttcgacatctggggccaagggacaatggtcaccgtgtcctcaggcggaggtggaagcggagggggaggatctggcggcggaggaagcggaggcgacatccagatgacccagtctccatcctccctgtctgcatctgtaggagacagagtcaccatcacttgccgggcaagtcagagcattagcagctatttaaattggtatcagcagaaaccagggaaagcccctaagctcctgatctatgctgcatccagtttgcaaagtggggtcccatcaaggttcagtggcagtggatctgggacagatttcactctcaccatcagcagtctgcaacctgaagattttgcaacttactactgtcaacagagttacagtacccctctcactttcggcggcggaacaaaggtggagatcaag

SEQ ID NO: 216 - protein, 251 aa, Artificial Sequence
  C-2753/C-782 (HPV E7 pep2)
EVQLVESGGGLVKPGGSLRLSCAASGFTFSNAWMSWVRQAPGKGLEWVGRIKSKTDGGTTDYAAPVKGRFTISRDDSKNTLYLQMNSLKTEDTAVYYCTTSYDYLLNPYRWNWFDPWGQGTLVTVSSGGGGSGGGGSGGGGSGGDIQMTQSPSSLSASVGDRVTITCRASQSISSYLNWYQQKPGKAPKLLIYAASSLQSGVPSRFSGSGSGTDFTLTISSLQPEDFATYYCQQSYSTPLTFGGGTKVEIK

SEQ ID NO: 217 - DNA, 753 bp, Artificial Sequence
  C-2753/C-782 (HPV E7 pep2)
gaagtgcagctggtggaaagcggcggaggcctggtgaaacctggcggcagcctgagactgagctgcgccgccagcggcttcaccttctcgaacgcctggatgagctgggtccgccaggcccctggcaagggactggaatgggtcggacggatcaagagcaagaccgacggcggcaccaccgactacgctgcccccgtgaagggccggttcaccatcagccgggacgacagcaagaacaccctgtacctgcagatgaacagcctgaaaaccgaggacaccgccgtgtattactgtaccacctcctacgattaccttctcaatccttatcgttggaactggttcgacccctggggccagggaaccctggtcaccgtgtcctcaggcggaggtggaagcggagggggaggatctggcggcggaggaagcggcggagacatccagatgacccagtctccatcctccctgtctgcatctgtaggagacagagtcaccatcacttgccgggcaagtcagagcattagcagctatttaaattggtatcagcagaaaccagggaaagcccctaagctcctgatctatgctgcatccagtttgcaaagtggggtcccatcaaggttcagtggcagtggatctgggacagatttcactctcaccatcagcagtctgcaacctgaagattttgcaacttactactgtcaacagagttacagtacccctctcactttcggcggcggaacaaaggtggagatcaag

SEQ ID NO: 218 - protein, 246 aa, Artificial Sequence
  C-2752/C-1511 (MAGE-A3 pep2)
QVQLVQSGAEVKKPGSSVKVSCKASGGTFSSYAISWVRQAPGQGLEWMGGIIPIFGTANYAQKFQGRVTITADESTSTAYMELSSLRSEDTAVYYCARDMDTFSMVTLFDYWGQGTLVTVSSGGGGSGGGGSGGGGSGGDIQMTQSPSSLSASVGDRVTITCRASQSISSYLNWYQQKPGKAPKLLIYAASSLQSGVPSRFSGSGSGTDFTLTISSLQPEDFATYYCQQSYSWPLTFGGGTKVEIK

SEQ ID NO: 219 - DNA, 738 bp, Artificial Sequence
  C-2752/C-1511 (MAGE-A3 pep2)
caggtgcagctggtgcagtctggcgccgaagtgaagaaacccggcagcagcgtgaaggtgtcctgcaaggccagcggcggcaccttcagcagctacgccatcagctgggtccgccaggctcctggacagggactggaatggatgggcggcatcatccccatcttcggcaccgccaactacgcccagaaattccagggcagagtgaccatcaccgccgacgagagcaccagcaccgcctacatggaactgagcagccttcgaagcgaggacaccgctgtgtattactgtgccagggacatggacaccttctccatggtgaccctgttcgactactggggccagggcaccctggtcaccgtgtcctcaggcggaggtggaagcggagggggaggatctggcggcggaggaagcggaggcgacatccagatgacccagagccccagcagcctgagcgccagcgtgggcgacagagtgaccatcacctgtcgggccagccagtcgatcagcagctacctgaactggtatcagcagaagcccggcaaggcccccaagctgctgatctacgccgccagctccctgcagagcggcgtgccaagcagattcagcggcagcggctccggcaccgacttcaccctgaccatcagcagcctgcagcccgaggacttcgccacctactactgccagcagagttacagttggcctctcactttcggcggagggaccaaggtggagatcaaa

SEQ ID NO: 220 - protein, 245 aa, Artificial Sequence
  C-2300/C-2195 (KRAS G12V pep14)
QVTLRESGPALVKPTQTLTLTCTFSGFSLSTSGMCVSWIRQPPGKALEWLALIDWDDDKYYSTSLKTRLTISKDTSKNQVVLTMTNMDPVDTATYYCARSYDELYYFDYWGQGTLVTVSSGGGGSGGGGSGGGGSGGDIQMTQSPSSLSASVGDRVTITCRASQSIWTSYLNWYQQKPGKAPKLLIYAASSLQSGVPSRFSGSGSGTDFTLTISSLQPEDFATYYCQQSYSTPLTFGGGTKVEIK

SEQ ID NO: 221 - DNA, 735 bp, Artificial Sequence
  C-2300/C-2195 (KRAS G12V pep14)
caggtcacactgagagagtccggccctgccctggtgaaacccacccagaccctgaccctgacatgcaccttcagcggcttcagcctgagcaccagcgggatgtgcgtgtcctggattcgacagccccctggcaaggccctggaatggctggccctgattgactgggacgacgacaagtactacagcaccagcctgaaaacccggctgaccatcagcaaggacaccagcaagaaccaggtggtgctgaccatgaccaacatggaccccgtggacaccgccacgtattactgtgcacggagttacgacgagctctactactttgactactggggccagggaaccctggtcaccgtgtcctcaggcggaggtggaagcggagggggaggatctggcggcggaggaagcggaggcgacatccagatgacccagagccccagctccctctctgcatctgtgggcgacagagtgaccatcacctgtcgggccagccagtcgatctggaccagctacctgaactggtatcagcagaagcccggcaaggcccccaagctgctgatctacgccgccagctccctgcagagcggcgtgccaagcagattcagcggcagcggctccggcaccgacttcaccctgaccatcagcagcctgcagcccgaggacttcgccacctactactgccagcagagttacagtacccctctcactttcggcggagggaccaaggtggagatcaaa

SEQ ID NO: 222 - protein, 5 aa, Artificial Sequence
  flexible polypeptide linker
GGGGS

SEQ ID NO: 223 - protein, 10 aa, Artificial Sequence
  flexible polypeptide linker
GGGGSGGGGS

SEQ ID NO: 224 - protein, 15 aa, Artificial Sequence
  flexible polypeptide linker
GGGGSGGGGSGGGGS

SEQ ID NO: 225 - protein, 15 aa, Artificial Sequence
  flexible polypeptide linker
GGGGSGGGGSGGGGS

SEQ ID NO: 226 - protein, 20 aa, Artificial Sequence
  flexible polypeptide linker
GGGGSGGGGSGGGGSGGGGS

SEQ ID NO: 227 - protein, 4 aa, Artificial Sequence
  flexible polypeptide linker
GGGS

SEQ ID NO: 228 - protein, 247 aa, Artificial Sequence
  C-02256 (Kp33A1101_H125 scFv)
QVQLVESGGGLVKPGGSLRLSCAASGFTFSDYYMSWIRQAPGKGLEWVSYISSSGSTIYYADSVKGRFTISRDNAKNSLYLQMNSLRAEDTAVYYCARDFTRDYYYYYYMDVWGKGTTVTVSSGGGGSGGGGSGGGGSGGDIQMTQSPSSLSASVGDRVTITCRASQSISSYLNWYQQKPGKAPKLLIYAASSLQSGVPSRFSGSGSGTDFTLTISSLQPEDFATYYCQQSYSTPLTFGGGTKVEIK

SEQ ID NO: 229 - DNA, 741 bp, Artificial Sequence
  C-02256 (Kp33A1101_H125 scFv)
caggtgcagctggtggaaagcggcggaggcctggtgaaacctggcggcagcctgagactgagctgcgccgccagcggcttcaccttcagcgactactacatgagctggatcagacaggcccctggcaagggactggaatgggtgtcctacatcagcagcagcggctcgaccatctactacgccgacagcgtgaagggccggttcaccatcagccgggacaacgccaagaacagcctgtacctgcagatgaacagcctgcgggccgaggacaccgccgtgtattactgtgccagggacttcaccagggactactactactactactacatggacgtgtggggcaaagggaccacggtcaccgtgtcctcaggcggaggtggaagcggagggggaggatctggcggcggaggaagcggaggcgacatccagatgacccagtctccatcctccctgtctgcatctgtaggagacagagtcaccatcacttgccgggcaagtcagagcattagcagctatttaaattggtatcagcagaaaccagggaaagcccctaagctcctgatctatgctgcatccagtttgcaaagtggggtcccatcaaggttcagtggcagtggatctgggacagatttcactctcaccatcagcagtctgcaacctgaagattttgcaacttactactgtcaacagagttacagtacccctctcactttcggcggcggaacaaaggtggagatcaag

SEQ ID NO: 230 - protein, 244 aa, Artificial Sequence
  C-02257 (K14A11:01_V001_scFv)
QVTLRESGPALVKPTQTLTLTCTFSGFSLSTSGMCVSWIRQPPGKALEWLALIDWDDDKYYSTSLKTRLTISKDTSKNQVVLTMTNMDPVDTATYYCARSYDELYYFDYWGQGTLVTVSSGGGGSGGGGSGGGGSGGDIQMTQSPSSLSASVGDRVTITCRASQSISSYLNWYQQKPGKAPKLLIYAASSLQSGVPSRFSGSGSGTDFTLTISSLQPEDFATYYCQQSYSTPLTFGGGTKVEIK

SEQ ID NO: 231 - DNA, 732 bp, Artificial Sequence
  C-02257 (K14A11:01_V001_scFv)
caggtcacactgagagagtccggccctgccctggtgaaacccacccagaccctgaccctgacatgcaccttcagcggcttcagcctgagcaccagcgggatgtgcgtgtcctggattcgacagccccctggcaaggccctggaatggctggccctgattgactgggacgacgacaagtactacagcaccagcctgaaaacccggctgaccatcagcaaggacaccagcaagaaccaggtggtgctgaccatgaccaacatggaccccgtggacaccgccacgtattactgtgcacggagttacgacgagctctactactttgactactggggccagggaaccctggtcaccgtgtcctcaggcggaggtggaagcggagggggaggatctggcggcggaggaagcggaggcgacatccagatgacccagtctccatcctccctgtctgcatctgtaggagacagagtcaccatcacttgccgggcaagtcagagcattagcagctatttaaattggtatcagcagaaaccagggaaagcccctaagctcctgatctatgctgcatccagtttgcaaagtggggtcccatcaaggttcagtggcagtggatctgggacagatttcactctcaccatcagcagtctgcaacctgaagattttgcaacttactactgtcaacagagttacagtacccctctcactttcggcggcggaacaaaggtggagatcaag

SEQ ID NO: 232 - DNA, 735 bp, Artificial Sequence; identical to SEQ ID NO: 221
  C-002300 (K14A11:01 H001/L004_scFv)

SEQ ID NO: 233 - DNA, 732 bp, Artificial Sequence
  C-002301 (K14A11:01 H001/L010 scFv)
caggtcacactgagagagtccggccctgccctggtgaaacccacccagaccctgaccctgacatgcaccttcagcggcttcagcctgagcaccagcgggatgtgcgtgtcctggattcgacagccccctggcaaggccctggaatggctggccctgattgactgggacgacgacaagtactacagcaccagcctgaaaacccggctgaccatcagcaaggacaccagcaagaaccaggtggtgctgaccatgaccaacatggaccccgtggacaccgccacgtattactgtgcacggagttacgacgagctctactactttgactactggggccagggaaccctggtcaccgtgtcctcaggcggaggtggaagcggagggggaggatctggcggcggaggaagcggaggcgacatccagatgacccagagccccagctccctctctgcatctgtgggcgacagagtgaccatcacctgtcgggccagccagtcgatcagcagctacctgaactggtatcagcagaagcccggcaaggcccccaagctgctgatctacgccgccagctccctgcagagcggcgtgccaagcagattcagcggcagcggctccggcaccgacttcaccctgaccatcagcagcctgcagcccgaggacttcgccacctactactgccagcagagttacagtacccggctcactttcggcggagggaccaaggtggagatcaaa

SEQ ID NO: 234 - protein, 244 aa, Artificial Sequence
  C-002365 [pLenti 1 K33A1101_V002 TCRa T48C (G12D TRAV4-4/DV10*01)]
MQRNLGAVLGILWVQICWVRGDQVEQSPSALSLHEGTDSALRCNFTTTMRSVQWFRQNSRGSLISLFYLASGTKENGRLKSAFDSKERRYSTLHIRDAQLEDSGTYFCAADSSNTGYQNFYFGKGTSLTVIPNIQNPEPAVYQLKDPRSQDSTLCLFTDFDSQINVPKTMESGTFITDKCVLDMKAMDSKSNGAIAWSNQTSFTCQDIFKETNATYPSSDVPCDATLTEKSFETDMNLNFQNLS

SEQ ID NO: 235 - DNA, 732 bp, Artificial Sequence
  C-002365 [pLenti 1 K33A1101_V002 TCRa T48C (G12D TRAV4-4/DV10*01)]
atgcagaggaacctgggagctgtgctggggattctgtgggtgcagatttgctgggtgagaggggatcaggtggagcagagtccttcagccctgagcctccacgagggaaccgattctgctctgagatgcaattttacgaccaccatgaggagtgtgcagtggttccgacagaattccaggggcagcctcatcagtttgttctacttggcttcaggaacaaaggagaatgggaggctaaagtcagcatttgattctaaggagcggcgctacagcaccctgcacatcagggatgcccagctggaggactcaggcacttacttctgtgctgctgactcttcgaacacgggttaccagaacttctattttgggaaaggaacaagtttgactgtcattccaaacatccagaacccagaacctgctgtgtaccagttaaaagatcctcggtctcaggacagcaccctctgcctgttcaccgactttgactcccaaatcaatgtgccgaaaaccatggaatctggaacgttcatcactgacaaatgtgtgctggacatgaaagctatggattccaagagcaatggggccattgcctggagcaaccagacaagcttcacctgccaagatatcttcaaagagaccaacgccacctaccccagttcagacgttccctgtgatgccacgttgaccgagaaaagctttgaaacagatatgaacctgaactttcaaaacctgtct

SEQ ID NO: 236 - protein, 283 aa, Artificial Sequence
  C-002367 [pLenti 1 K33A1101_V002 TCRb S51C (TRBV12-2*01)]
MSNTAFPDPAWNTTLLSWVALFLLGTSSANSGVVQSPRYIIKGKGERSILKCIPISGHLSVAWYQQTQGQELKFFIQHYDKMERDKGNLPSRFSVQQFDDYHSEMNMSALELEDSAVYFCASSLTDPLDSDYTFGSGTRLLVIEDLRNVTPPKVSLFEPSKAEIANKQKATLVCLARGFFPDHVELSWWVNGKEVHSGVCTDPQAYKESNYSYCLSSRLRVSATFWHNPRNHFRCQVQFHGLSEEDKWPEGSPKPVTQNISAEAWGRADCGITSASYQQGVLS

SEQ ID NO: 237 - DNA, 849 bp, Artificial Sequence
  C-002367 [pLenti 1 K33A1101_V002 TCRb S51C (TRBV12-2*01)]
atgtctaacactgccttccctgaccccgcctggaacaccaccctgctatcttgggttgctctctttctcctgggaacaagttcagcaaattctggggttgtccagtctccaagatacataatcaaaggaaagggagaaaggtccattctaaaatgtattcccatctctggacatctctctgtggcctggtatcaacagactcaggggcaggaactaaagttcttcattcagcattatgataaaatggagagagataaaggaaacctgcccagcagattctcagtccaacagtttgatgactatcactctgagatgaacatgagtgccttggagctagaggactctgccgtgtacttctgtgccagctctctcacagatccgctagactccgactacaccttcggctcagggaccaggcttttggtaatagaggatctgagaaatgtgactccacccaaggtctccttgtttgagccatcaaaagcagagattgcaaacaaacaaaaggctaccctcgtgtgcttggccaggggcttcttccctgaccacgtggagctgagctggtgggtgaatggcaaggaggtccacagtggggtctgcacggaccctcaggcctacaaggagagcaattatagctactgcctgagcagccgcctgagggtctctgctaccttctggcacaatcctcgcaaccacttccgctgccaagtgcagttccatgggctttcagaggaggacaagtggccagagggctcacccaaacctgtcacacagaacatcagtgcagaggcctggggccgagcagactgtgggattacctcagcatcctatcaacaaggggtcttgtct

SEQ ID NO: 238 - DNA, 849 bp, Artificial Sequence; identical to SEQ ID NO: 237
  C-002368 [pLenti 1 K33A1101_V002 TCRb S51C (TRBV12-2*01)]

SEQ ID NO: 239 - protein, 248 aa, Artificial Sequence
  C-002369 [pLenti 1 Kp514A1101_V001 TCRa T48C (G12 V TRAV3-3*01)]
MKTVTGPLFLCFWLQLNCVSRGEQVEQRPPHLSVREGDSAVITCTYTDPNSYYFFWYKQEPGASLQLLMKVFSSTEINEGQGFTVLLNKKDKRLSLNLTAAHPGDSAAYFCAVSGGTNSAGNKLTFGIGTRVLVRPDIQNPEPAVYQLKDPRSQDSTLCLFTDFDSQINVPKTMESGTFITDKCVLDMKAMDSKSNGAIAWSNQTSFTCQDIFKETNATYPSSDVPCDATLTEKSFETDMNLNFQNLS

SEQ ID NO: 240 - DNA, 744 bp, Artificial Sequence
  C-002369 [pLenti 1 Kp514A1101_V001 TCRa T48C (G12 V TRAV3-3*01)]
atgaagacggtgactggacctttgttcctgtgcttctggctgcagctgaactgtgtgagcagaggcgagcaggtggagcagcgccctcctcacctgagtgtccgggagggagacagtgccgttatcacctgcacctacacagaccctaacagttattacttcttctggtacaagcaagagccgggggcaagtcttcagttgcttatgaaggttttctcaagtacggaaataaacgaaggacaaggattcactgtcctactgaacaagaaagacaaacgactctctctgaacctcacagctgcccatcctggggactcagccgcgtacttctgcgcagtcagtggagggactaacagtgcagggaacaagctaacttttggaattggaaccagggtgctggtcaggccagacatccagaacccagaacctgctgtgtaccagttaaaagatcctcggtctcaggacagcaccctctgcctgttcaccgactttgactcccaaatcaatgtgccgaaaaccatggaatctggaacgttcatcactgacaaatgtgtgctggacatgaaagctatggattccaagagcaatggggccattgcctggagcaaccagacaagcttcacctgccaagatatcttcaaagagaccaacgccacctaccccagttcagacgttccctgtgatgccacgttgaccgagaaaagctttgaaacagatatgaacctgaactttcaaaacctgtct

SEQ ID NO: 241 - protein, 272 aa, Artificial Sequence
  C-002371 [pLenti 1 Kp514A1101_V001 TCRb S51C (TRBV4*01)]
MGCRLLSCVAFCLLGIGPLETAVFQTPNYHVTQVGNEVSFNCKQTLGHDTMYWYKQDSKKLLKIMFSYNNKQLIVNETVPRRFSPQSSDKAHLNLRIKSVEPEDSAVYLCASSRDWGPAEQFFGPGTRLTVLEDLRNVTPPKVSLFEPSKAEIANKQKATLVCLARGFFPDHVELSWWVNGKEVHSGVCTDPQAYKESNYSYCLSSRLRVSATFWHNPRNHFRCQVQFHGLSEEDKWPEGSPKPVTQNISAEAWGRADCGITSASYHQGVLS

SEQ ID NO: 242 - DNA, 816 bp, Artificial Sequence
  C-002371 [pLenti 1 Kp514A1101_V001 TCRb S51C (TRBV4*01)]
atgggctgtaggctcctaagctgtgtggccttctgcctcttgggaataggccctttggagacagctgttttccagactccaaactatcatgtcacacaggtgggaaatgaagtgtctttcaattgtaagcaaactctgggccacgatactatgtattggtacaagcaagactctaagaaattgctgaagattatgtttagctacaataataagcaactcattgtaaacgaaacagttccaaggcgcttctcacctcagtcttcagataaagctcatttgaatcttcgaatcaagtctgtagagccggaggactctgctgtgtatctctgtgccagcagtcgggactgggggcctgctgagcagttcttcggaccagggacacgactcaccgtcctagaggatctgagaaatgtgactccacccaaggtctccttgtttgagccatcaaaagcagagattgcaaacaaacaaaaggctaccctcgtgtgcttggccaggggcttcttccctgaccacgtggagctgagctggtgggtgaatggcaaggaggtccacagtggggtctgcacggaccctcaggcctacaaggagagcaattatagctactgcctgagcagccgcctgagggtctctgctaccttctggcacaatcctcgaaaccacttccgctgccaagtgcagttccatgggctttcagaggaggacaagtggccagagggctcacccaaacctgtcacacagaacatcagtgcagaggcctggggccgagcagactgtggaatcacttcagcatcctatcatcagggggttctgtct

SEQ ID NO: 243 - DNA, 816 bp, Artificial Sequence; identical to SEQ ID NO: 242
  C-002372 [pLenti 1 Kp514A1101_V001 TCRb S51C (TRBV4*01)]

SEQ ID NO: 244 - DNA, 732 bp, Artificial Sequence; identical to SEQ ID NO: 235
  C-002366 [pLenti 1 K33A1101_V002 TCRa T48C (G12D TRAV4-4/DV10*01)]

SEQ ID NO: 245 - DNA, 744 bp, Artificial Sequence; identical to SEQ ID NO: 240
  C-002370 [pLenti 1 Kp514A1101_V001 TCRa T48C (G12 V TRAV3-3*01)]

SEQ ID NO: 246 - protein, 9 aa, Artificial Sequence
  mH-Y H-2Db peptide
KCSRNRQYL

SEQ ID NO: 247 - protein, 614 aa, Artificial Sequence
  C-003119 (H-Y TCRalpha P2A TCRbeta Jb2.3 mouse):
MFPVTILLLSAFFSLRGNSAQSVDQPDAHVTLSEGASLELRCSYSYSAAPYLFWYVQYPGQSLQFLLKYITGDTVVKGTKGFEAEFRKSNSSFNLKKSPAHWSDSAKYFCALEGQDQGGSAKLIFGEGTKLTVSSPDIQNPEPAVYQLKDPRSQDSTLCLFTDFDSQINVPKTMESGTFITDKTVLDMKAMDSKSNGAIAWSNQTSFTCQDIFKETNATYPSSDVPCDATLTEKSFETDMNLNFQNLSVMGLRILLLKVAGFNLLMTLRLWSSRAKRSGSGATNFSLLKQAGDVEENPGPMSNTAFPDPAWNTTLLSWVALFLLGTKHMEAAVTQSPRNKVAVTGGKVTLSCNQTNNHNNMYWYRQDTGHGLRLIHYSYGAGSTEKGDIPDGYKASRPSQENFSLILELATPSQTSVYFCASGDNSAETLYFGPGTRLTVLEDLRNVTPPKVSLFEPSKAEIANKQKATLVCLARGFFPDHVELSWWVNGKEVHSGVSTDPQAYKESNYSYCLSSRLRVSATFWHNPRNHFRCQVQFHGLSEEDKWPEGSPKPVTQNISAEAWGRADCGITSASYHQGVLSATILYEILLGKATLYAVLVSGLVLMAMVKKKNS

SEQ ID NO: 248 - DNA, 1845 bp, Artificial Sequence
  C-003119 (H-Y TCRalpha P2A TCRbeta Jb2.3 mouse)
atgttccccgttaccatattgctcctgagtgctttcttcagtttgcgagggaactctgcccaatctgtcgatcagccagatgcacacgttaccctttccgagggtgcgtcacttgaactgaggtgttcctatagctactcagcagccccttatctgttttggtacgtacaatacccagggcagagtctccaatttctccttaaatatataaccggggacactgtagtgaaggggactaaaggttttgaagcagagtttaggaagagcaacagctccttcaaccttaagaagtcacccgcacactggtcagactccgcgaaatacttctgtgctctggaagggcaagaccagggtggaagtgccaaattgatatttggtgagggtactaaattgactgttagctcaccagacatccagaacccagaacctgctgtgtaccagttaaaagatcctcggtctcaggacagcaccctctgcctgttcaccgactttgactcccaaatcaatgtgccgaaaaccatggaatctggaacgttcatcactgacaaaactgtgctggacatgaaagctatggattccaagagcaatggggccattgcctggagcaaccagacaagcttcacctgccaagatatcttcaaagagaccaacgccacctaccccagttcagacgttccctgtgatgccacgttgaccgagaaaagctttgaaacagatatgaacctaaactttcaaaacctgtcagttatgggactccgaatcctcctgctgaaagtagcgggatttaacctgctcatgacgctgaggctgtggtccagtcgggccaagcggtccggatccggagccaccaacttcagcctgctgaagcaggccggcgacgtggaggagaaccccggccccatgtctaatactgcatttccagatccggcctggaatactacactccttagttgggttgccctcttcctccttggcacgaagcacatggaagccgccgtcacccagagtccgagaaacaaagtagcggtcaccggcggtaaggtaacattgagttgtaaccaaacgaacaaccataacaatatgtactggtatagacaagacacaggccatggcttgcgcctgattcactacagctatggagcggggagtacggagaagggtgatattcccgatggctataaagcctctcggcctagccaggagaattttagtttgatcctggagctcgcaacccccagtcagactagcgtctacttttgtgcctcaggcgacaatagtgcggaaaccctttacttcggccctgggacaagacttacagttctagaggatctgagaaatgtgactccacccaaggtctccttgtttgagccatcaaaagcagagattgcaaacaaacaaaaggctaccctcgtgtgcttggccaggggcttcttccctgaccacgtggagctgagctggtgggtgaatggcaaggaggtccacagtggggtcagcacggaccctcaggcctacaaggagagcaattatagctactgcctgagcagccgcctgagggtctctgctaccttctggcacaatcctcgaaaccacttccgctgccaagtgcagttccatgggctttcagaggaggacaagtggccagagggctcacccaaacctgtcacacagaacatcagtgcagaggcctggggccgagcagactgtggaatcacttcagcatcctatcatcagggggttctgtctgcaaccatcctctatgagatcctactggggaaggccaccctatatgctgtgctggtcagtggcctggtgctgatggccatggtcaagaaaaaaaattcctag

SEQ ID NO: 249 - protein, 619 aa, Artificial Sequence
  C-003120 (H-Y TCRalpha T48C P2A H-Y TCRbeta Jb2.3 S57C human):
MFPVTILLLSAFFSLRGNSAQSVDQPDAHVTLSEGASLELRCSYSYSAAPYLFWYVQYPGQSLQFLLKYITGDTVVKGTKGFEAEFRKSNSSFNLKKSPAHWSDSAKYFCALEGQDQGGSAKLIFGEGTKLTVSSPYIQNPDPAVYQLRDSKSSDKSVCLFTDFDSQTNVSQSKDSDVYITDKCVLDMRSMDFKSNSAVAWSNKSDFACANAFNNSIIPEDTFFPSPESSCDVKLVEKSFETDTNLNFQNLSVIGFRILLLKVAGFNLLMTLRLWSSGSGATNFSLLKQAGDVEENPGPMSNTAFPDPAWNTTLLSWVALFLLGTKHMEAAVTQSPRNKVAVTGGKVTLSCNQTNNHNNMYWYRQDTGHGLRLIHYSYGAGSTEKGDIPDGYKASRPSQENFSLILELATPSQTSVYFCASGDNSAETLYFGPGTRLTVLEDLKNVFPPEVAVFEPSEAEISHTQKATLVCLATGFYPDHVELSWWVNGKEVHSGVCTDPQPLKEQPALNDSRYCLSSRLRVSATFWQNPRNHFRCQVQFYGLSENDEWTQDRAKPVTQIVSAEAWGRADCGFTSESYQQGVLSATILYEILLGKATLYAVLVSALVLMAMVKRKDSRG

SEQ ID NO: 250 - DNA, 1860 bp, Artificial Sequence
  C-003120 (H-YTCRalpha T48C P2A H-Y TCRbeta Jb2.3 S57C human)
atgttccccgttaccatattgctcctgagtgctttcttcagtttgcgagggaactctgcccaatctgtcgatcagccagatgcacacgttaccctttccgagggtgcgtcacttgaactgaggtgttcctatagctactcagcagccccttatctgttttggtacgtacaatacccagggcagagtctccaatttctccttaaatatataaccggggacactgtagtgaaggggactaaaggttttgaagcagagtttaggaagagcaacagctccttcaaccttaagaagtcacccgcacactggtcagactccgcgaaatacttctgtgctctggaagggcaagaccagggtggaagtgccaaattgatatttggtgagggtactaaattgactgttagctcaccgtatatccagaaccctgaccctgccgtgtaccagctgagagactctaaatccagtgacaagtctgtctgcctattcaccgattttgattctcaaacaaatgtgtcacaaagtaaggattctgatgtgtatatcacagacaaatgtgtgctagacatgaggtctatggacttcaagagcaacagtgctgtggcctggagcaacaaatctgactttgcatgtgcaaacgccttcaacaacagcattattccagaagacaccttcttccccagcccagaaagttcctgtgatgtcaagctggtcgagaaaagctttgaaacagatacgaacctaaactttcaaaacctgtcagtgattgggttccgaatcctcctcctgaaagtggccgggtttaatctgctcatgacgctgcggctgtggtccagcggatccggagccaccaacttcagcctgctgaagcaggccggcgacgtggaggagaaccccggccccatgtctaatactgcatttccagatccggcctggaatactacactccttagttgggttgccctcttcctccttggcacgaagcacatggaagccgccgtcacccagagtccgagaaacaaagtagcggtcaccggcggtaaggtaacattgagttgtaaccaaacgaacaaccataacaatatgtactggtatagacaagacacaggccatggcttgcgcctgattcactacagctatggagcggggagtacggagaagggtgatattcccgatggctataaagcctctcggcctagccaggagaattttagtttgatcctggagctcgcaacccccagtcagactagcgtctacttttgtgcctcaggcgacaatagtgcggaaaccctttacttcggccctgggacaagacttacagttctggaggacctgaaaaacgtgttcccacccgaggtcgctgtgtttgagccatcagaagcagagatctcccacacccaaaaggccacactggtgtgcctggccacaggcttctaccccgaccacgtggagctgagctggtgggtgaatgggaaggaggtgcacagtggggtctgcacagacccgcagcccctcaaggagcagcccgccctcaatgactccagatactgcctgagcagccgcctgagggtgtcggccaccttctggcagaacccccgcaaccacttccgctgtcaagtccagttctacgggctctcggagaatgacgagtggacccaggatagggccaaacctgtcacccagatcgtcagcgccgaggcctggggtagagcagactgtggcttcacctccgagtcttaccagcaaggggtcctgtctgccaccatcctctatgagatcttgctagggaaggccaccttgtatgccgtgctggtcagtgccctcgtgctgatggccatggtcaagagaaaggattccagaggctag

SEQ ID NO: 251 - protein, 614 aa, Artificial Sequence
  C-003121 (H-Y TCRalpha P2A TCRbeta Jb2.3L mouse):
MFPVTILLLSAFFSLRGNSAQSVDQPDAHVTLSEGASLELRCSYSYSAAPYLFWYVQYPGQSLQFLLKYITGDTVVKGTKGFEAEFRKSNSSFNLKKSPAHWSDSAKYFCALEGQDQGGSAKLIFGEGTKLTVSSPDIQNPEPAVYQLKDPRSQDSTLCLFTDFDSQINVPKTMESGTFITDKTVLDMKAMDSKSNGAIAWSNQTSFTCQDIFKETNATYPSSDVPCDATLTEKSFETDMNLNFQNLSVMGLRILLLKVAGFNLLMTLRLWSSRAKRSGSGATNFSLLKQAGDVEENPGPMSNTAFPDPAWNTTLLSWVALFLLGTKHMEAAVTQSPRNKVAVTGGKVTLSCNQTNNHNNMYWYRQDTGHGLRLIHYSYGAGSTEKGDIPDGYKASRPSQENFSLILELATPSQTSVYFCASGDNSAETLYFGPGTRLLVLEDLRNVTPPKVSLFEPSKAEIANKQKATLVCLARGFFPDHVELSWWVNGKEVHSGVSTDPQAYKESNYSYCLSSRLRVSATFWHNPRNHFRCQVQFHGLSEEDKWPEGSPKPVTQNISAEAWGRADCGITSASYHQGVLSATILYEILLGKATLYAVLVSGLVLMAMVKKKNS

SEQ ID NO: 252 - DNA, 1845 bp, Artificial Sequence
  C-003121 (H-Y TCRalpha P2A TCRbeta Jb2.3L mouse)
atgttccccgttaccatattgctcctgagtgctttcttcagtttgcgagggaactctgcccaatctgtcgatcagccagatgcacacgttaccctttccgagggtgcgtcacttgaactgaggtgttcctatagctactcagcagccccttatctgttttggtacgtacaatacccagggcagagtctccaatttctccttaaatatataaccggggacactgtagtgaaggggactaaaggttttgaagcagagtttaggaagagcaacagctccttcaaccttaagaagtcacccgcacactggtcagactccgcgaaatacttctgtgctctggaagggcaagaccagggtggaagtgccaaattgatatttggtgagggtactaaattgactgttagctcaccagacatccagaacccagaacctgctgtgtaccagttaaaagatcctcggtctcaggacagcaccctctgcctgttcaccgactttgactcccaaatcaatgtgccgaaaaccatggaatctggaacgttcatcactgacaaaactgtgctggacatgaaagctatggattccaagagcaatggggccattgcctggagcaaccagacaagcttcacctgccaagatatcttcaaagagaccaacgccacctaccccagttcagacgttccctgtgatgccacgttgaccgagaaaagctttgaaacagatatgaacctaaactttcaaaacctgtcagttatgggactccgaatcctcctgctgaaagtagcgggatttaacctgctcatgacgctgaggctgtggtccagtcgggccaagcggtccggatccggagccaccaacttcagcctgctgaagcaggccggcgacgtggaggagaaccccggccccatgtctaatactgcatttccagatccggcctggaatactacactccttagttgggttgccctcttcctccttggcacgaagcacatggaagccgccgtcacccagagtccgagaaacaaagtagcggtcaccggcggtaaggtaacattgagttgtaaccaaacgaacaaccataacaatatgtactggtatagacaagacacaggccatggcttgcgcctgattcactacagctatggagcggggagtacggagaagggtgatattcccgatggctataaagcctctcggcctagccaggagaattttagtttgatcctggagctcgcaacccccagtcagactagcgtctacttttgtgcctcaggcgacaatagtgcggaaaccctttacttcggccctgggacaagacttttggttctagaggatctgagaaatgtgactccacccaaggtctccttgtttgagccatcaaaagcagagattgcaaacaaacaaaaggctaccctcgtgtgcttggccaggggcttcttccctgaccacgtggagctgagctggtgggtgaatggcaaggaggtccacagtggggtcagcacggaccctcaggcctacaaggagagcaattatagctactgcctgagcagccgcctgagggtctctgctaccttctggcacaatcctcgaaaccacttccgctgccaagtgcagttccatgggctttcagaggaggacaagtggccagagggctcacccaaacctgtcacacagaacatcagtgcagaggcctggggccgagcagactgtggaatcacttcagcatcctatcatcagggggttctgtctgcaaccatcctctatgagatcctactggggaaggccaccctatatgctgtgctggtcagtggcctggtgctgatggccatggtcaagaaaaaaaattcctag

SEQ ID NO: 253 - protein, 619 aa, Artificial Sequence
  C-003122 (H-Y TCRalpha T48C P2A H-Y TCRbeta Jb2.3L S57C human):
MFPVTILLLSAFFSLRGNSAQSVDQPDAHVTLSEGASLELRCSYSYSAAPYLFWYVQYPGQSLQFLLKYITGDTVVKGTKGFEAEFRKSNSSFNLKKSPAHWSDSAKYFCALEGQDQGGSAKLIFGEGTKLTVSSPYIQNPDPAVYQLRDSKSSDKSVCLFTDFDSQTNVSQSKDSDVYITDKCVLDMRSMDFKSNSAVAWSNKSDFACANAFNNSIIPEDTFFPSPESSCDVKLVEKSFETDTNLNFQNLSVIGFRILLLKVAGFNLLMTLRLWSSGSGATNFSLLKQAGDVEENPGPMSNTAFPDPAWNTTLLSWVALFLLGTKHMEAAVTQSPRNKVAVTGGKVTLSCNQTNNHNNMYWYRQDTGHGLRLIHYSYGAGSTEKGDIPDGYKASRPSQENFSLILELATPSQTSVYFCASGDNSAETLYFGPGTRLLVLEDLKNVFPPEVAVFEPSEAEISHTQKATLVCLATGFYPDHVELSWWVNGKEVHSGVCTDPQPLKEQPALNDSRYCLSSRLRVSATFWQNPRNHFRCQVQFYGLSENDEWTQDRAKPVTQIVSAEAWGRADCGFTSESYQQGVLSATILYEILLGKATLYAVLVSALVLMAMVKRKDSRG

SEQ ID NO: 254 - DNA, 1860 bp, Artificial Sequence
  C-003122 (H-Y TCRalpha T48C P2A H-Y TCRbeta Jb2.3L S57C human)
atgttccccgttaccatattgctcctgagtgctttcttcagtttgcgagggaactctgcccaatctgtcgatcagccagatgcacacgttaccctttccgagggtgcgtcacttgaactgaggtgttcctatagctactcagcagccccttatctgttttggtacgtacaatacccagggcagagtctccaatttctccttaaatatataaccggggacactgtagtgaaggggactaaaggttttgaagcagagtttaggaagagcaacagctccttcaaccttaagaagtcacccgcacactggtcagactccgcgaaatacttctgtgctctggaagggcaagaccagggtggaagtgccaaattgatatttggtgagggtactaaattgactgttagctcaccgtatatccagaaccctgaccctgccgtgtaccagctgagagactctaaatccagtgacaagtctgtctgcctattcaccgattttgattctcaaacaaatgtgtcacaaagtaaggattctgatgtgtatatcacagacaaatgtgtgctagacatgaggtctatggacttcaagagcaacagtgctgtggcctggagcaacaaatctgactttgcatgtgcaaacgccttcaacaacagcattattccagaagacaccttcttccccagcccagaaagttcctgtgatgtcaagctggtcgagaaaagctttgaaacagatacgaacctaaactttcaaaacctgtcagtgattgggttccgaatcctcctcctgaaagtggccgggtttaatctgctcatgacgctgcggctgtggtccagcggatccggagccaccaacttcagcctgctgaagcaggccggcgacgtggaggagaaccccggccccatgtctaatactgcatttccagatccggcctggaatactacactccttagttgggttgccctcttcctccttggcacgaagcacatggaagccgccgtcacccagagtccgagaaacaaagtagcggtcaccggcggtaaggtaacattgagttgtaaccaaacgaacaaccataacaatatgtactggtatagacaagacacaggccatggcttgcgcctgattcactacagctatggagcggggagtacggagaagggtgatattcccgatggctataaagcctctcggcctagccaggagaattttagtttgatcctggagctcgcaacccccagtcagactagcgtctacttttgtgcctcaggcgacaatagtgcggaaaccctttacttcggccctgggacaagacttttggttctggaggacctgaaaaacgtgttcccacccgaggtcgctgtgtttgagccatcagaagcagagatctcccacacccaaaaggccacactggtgtgcctggccacaggcttctaccccgaccacgtggagctgagctggtgggtgaatgggaaggaggtgcacagtggggtctgcacagacccgcagcccctcaaggagcagcccgccctcaatgactccagatactgcctgagcagccgcctgagggtgtcggccaccttctggcagaacccccgcaaccacttccgctgtcaagtccagttctacgggctctcggagaatgacgagtggacccaggatagggccaaacctgtcacccagatcgtcagcgccgaggcctggggtagagcagactgtggcttcacctccgagtcttaccagcaaggggtcctgtctgccaccatcctctatgagatcttgctagggaaggccaccttgtatgccgtgctggtcagtgccctcgtgctgatggccatggtcaagagaaaggattccagaggctag

SEQ ID NO: 255 - protein, 9 aa, Artificial Sequence
  NY-ESO-1  peptide
SLLMWITQV

SEQ ID NO: 256 - protein, 9 aa, Artificial Sequence
  HA-1(R) peptide
VLRDDLLEA

SEQ ID NO: 257 - protein, 607 aa, Artificial Sequence
  C-000063 pLenti 1 NY-ESO1 1G4 TCRalpha T95L,S96Y,T48C P2A TCRbeta S57C
METLLGLLILWLQLQWVSSKQEVTQIPAALSVPEGENLVLNCSFTDSAIYNLQWFRQDPGKGLTSLLLIQSSQREQTSGRLNASLDKSSGRSTLYIAASQPGDSATYLCAVRPLYGGSYIPTFGRGTSLIVHPYIQNPDPAVYQLRDSKSSDKSVCLFTDFDSQTNVSQSKDSDVYITDKCVLDMRSMDFKSNSAVAWSNKSDFACANAFNNSIIPEDTFFPSPESSCDVKLVEKSFETDTNLNFQNLSVIGFRILLLKVAGFNLLMTLRLWSSGSGATNFSLLKQAGDVEENPGPMSIGLLCCAALSLLWAGPVNAGVTQTPKFQVLKTGQSMTLQCAQDMNHEYMSWYRQDPGMGLRLIHYSVGAGITDQGEVPNGYNVSRSTTEDFPLRLLSAAPSQTSVYFCASSYVGNTGELFFGEGSRLTVLEDLKNVFPPEVAVFEPSEAEISHTQKATLVCLATGFYPDHVELSWWVNGKEVHSGVCTDPQPLKEQPALNDSRYCLSSRLRVSATFWQNPRNHFRCQVQFYGLSENDEWTQDRAKPVTQIVSAEAWGRADCGFTSESYQQGVLSATILYEILLGKATLYAVLVSALVLMAMVKRKDSRG

SEQ ID NO: 258 - DNA, 1824 bp, Artificial Sequence
  C-000063 pLenti 1 NY-ESO1 1G4 TCRalpha T95L,S96Y,T48C P2A TCRbeta S57C
atggagacactcttgggcctgcttatcctttggctgcagctgcaatgggtgagcagcaaacaggaggtgacgcagattcctgcagctctgagtgtcccagaaggagaaaacttggttctgaactgcagtttcactgatagcgctatttacaacctccagtggtttaggcaggaccctgggaaaggactcacatctctgttgcttattcagtcaagtcagagagagcaaacaagtggaagacttaatgcctcgctggataaatcatcaggacgtagtactttatacattgcagcttctcagcctggtgactcagccacctacctctgtgctgtgaggcccctctacggaggaagctacatacctacatttggaagaggaaccagccttattgttcatccgtatatccagaaccctgaccctgccgtgtaccagctgagagactctaaatccagtgacaagtctgtctgcctattcaccgattttgattctcaaacaaatgtgtcacaaagtaaggattctgatgtgtatatcacagacaaatgtgtgctagacatgaggtctatggacttcaagagcaacagtgctgtggcctggagcaacaaatctgactttgcatgtgcaaacgccttcaacaacagcattattccagaagacaccttcttccccagcccagaaagttcctgtgatgtcaagctggtcgagaaaagctttgaaacagatacgaacctaaactttcaaaacctgtcagtgattgggttccgaatcctcctcctgaaagtggccgggtttaatctgctcatgacgctgcggctgtggtccagcggatccggagccaccaacttcagcctgctgaagcaggccggcgacgtggaggagaaccccggccccatgagcatcggcctcctgtgctgtgcagccttgtctctcctgtgggcaggtccagtgaatgctggtgtcactcagaccccaaaattccaggtcctgaagacaggacagagcatgacactgcagtgtgcccaggatatgaaccatgaatacatgtcctggtatcgacaagacccaggcatggggctgaggctgattcattactcagttggtgctggtatcactgaccaaggagaagtccccaatggctacaatgtctccagatcaaccacagaggatttcccgctcaggctgctgtcggctgctccctcccagacatctgtgtacttctgtgccagcagttacgtcgggaacaccggggagctgttttttggagaaggctctaggctgaccgtactggaggacctgaaaaacgtgttcccacccgaggtcgctgtgtttgagccatcagaagcagagatctcccacacccaaaaggccacactggtgtgcctggccacaggcttctaccccgaccacgtggagctgagctggtgggtgaatgggaaggaggtgcacagtggggtctgcacagacccgcagcccctcaaggagcagcccgccctcaatgactccagatactgcctgagcagccgcctgagggtgtcggccaccttctggcagaacccccgcaaccacttccgctgtcaagtccagttctacgggctctcggagaatgacgagtggacccaggatagggccaaacctgtcacccagatcgtcagcgccgaggcctggggtagagcagactgtggcttcacctccgagtcttaccagcaaggggtcctgtctgccaccatcctctatgagatcttgctagggaaggccaccttgtatgccgtgctggtcagtgccctcgtgctgatggccatggtcaagagaaaggattccagaggctag

SEQ ID NO: 259 - protein, 612 aa, Artificial Sequence
  C-000891 pLenti 1 K33A1101_V002 TCR (G12D TRAV4-4/DV10*01/BV12-2*01)
MQRNLGAVLGILWVQICWVRGDQVEQSPSALSLHEGTDSALRCNFTTTMRSVQWFRQNSRGSLISLFYLASGTKENGRLKSAFDSKERRYSTLHIRDAQLEDSGTYFCAADSSNTGYQNFYFGKGTSLTVIPNIQNPEPAVYQLKDPRSQDSTLCLFTDFDSQINVPKTMESGTFITDKTVLDMKAMDSKSNGAIAWSNQTSFTCQDIFKETNATYPSSDVPCDATLTEKSFETDMNLNFQNLSVMGLRILLLKVAGFNLLMTLRLWSSRAKRSGSGATNFSLLKQAGDVEENPGPMSNTAFPDPAWNTTLLSWVALFLLGTSSANSGVVQSPRYIIKGKGERSILKCIPISGHLSVAWYQQTQGQELKFFIQHYDKMERDKGNLPSRFSVQQFDDYHSEMNMSALELEDSAVYFCASSLTDPLDSDYTFGSGTRLLVIEDLRNVTPPKVSLFEPSKAEIANKQKATLVCLARGFFPDHVELSWWVNGKEVHSGVSTDPQAYKESNYSYCLSSRLRVSATFWHNPRNHFRCQVQFHGLSEEDKWPEGSPKPVTQNISAEAWGRADCGITSASYQQGVLSATILYEILLGKATLYAVLVSTLVVMAMVKRKNS

SEQ ID NO: 260 - DNA, 1839 bp, Artificial Sequence
  C-000891 pLenti 1 K33A1101_V002 TCR (G12D TRAV4-4/DV10*01/BV12-2*01)
atgcagaggaacctgggagctgtgctggggattctgtgggtgcagatttgctgggtgagaggggatcaggtggagcagagtccttcagccctgagcctccacgagggaaccgattctgctctgagatgcaattttacgaccaccatgaggagtgtgcagtggttccgacagaattccaggggcagcctcatcagtttgttctacttggcttcaggaacaaaggagaatgggaggctaaagtcagcatttgattctaaggagcggcgctacagcaccctgcacatcagggatgcccagctggaggactcaggcacttacttctgtgctgctgactcttcgaacacgggttaccagaacttctattttgggaaaggaacaagtttgactgtcattccaaacatccagaacccagaacctgctgtgtaccagttaaaagatcctcggtctcaggacagcaccctctgcctgttcaccgactttgactcccaaatcaatgtgccgaaaaccatggaatctggaacgttcatcactgacaaaactgtgctggacatgaaagctatggattccaagagcaatggggccattgcctggagcaaccagacaagcttcacctgccaagatatcttcaaagagaccaacgccacctaccccagttcagacgttccctgtgatgccacgttgaccgagaaaagctttgaaacagatatgaacctgaactttcaaaacctgtcagttatgggactccgaatcctcctgctgaaagtagcgggatttaacctgctcatgacgctgaggctgtggtccagtcgggccaagcggtccggatccggagccaccaacttcagcctgctgaagcaggccggcgacgtggaggagaaccccggccccatgtctaacactgccttccctgaccccgcctggaacaccaccctgctatcttgggttgctctctttctcctgggaacaagttcagcaaattctggggttgtccagtctccaagatacataatcaaaggaaagggagaaaggtccattctaaaatgtattcccatctctggacatctctctgtggcctggtatcaacagactcaggggcaggaactaaagttcttcattcagcattatgataaaatggagagagataaaggaaacctgcccagcagattctcagtccaacagtttgatgactatcactctgagatgaacatgagtgccttggagctagaggactctgccgtgtacttctgtgccagctctctcacagatccgctagactccgactacaccttcggctcagggaccaggcttttggtaatagaggatctgagaaatgtgactccacccaaggtctccttgtttgagccatcaaaagcagagattgcaaacaaacaaaaggctaccctcgtgtgcttggccaggggcttcttccctgaccacgtggagctgagctggtgggtgaatggcaaggaggtccacagtggggtcagcacggaccctcaggcctacaaggagagcaattatagctactgcctgagcagccgcctgagggtctctgctaccttctggcacaatcctcgcaaccacttccgctgccaagtgcagttccatgggctttcagaggaggacaagtggccagagggctcacccaaacctgtcacacagaacatcagtgcagaggcctggggccgagcagactgtgggattacctcagcatcctatcaacaaggggtcttgtctgccaccatcctctatgagatcctgctagggaaagccaccctgtatgctgtgcttgtcagtacactggtggtgatggctatggtcaaaagaaagaattcatag

SEQ ID NO: 261 - protein, 18 aa, Artificial Sequence
  T2A self-cleaving peptide
EGRGSLLTCGDVEENPGP

SEQ ID NO: 262 - protein, 20 aa, Artificial Sequence
  E2A self-cleaving peptide
QCTNYALLKLAGDVESNPGP

SEQ ID NO: 263 - protein, 22 aa, Artificial Sequence
  F2A self-cleaving peptide
VKQTLNFDLLKLAGDVESNPGP

SEQ ID NO: 264 - protein, 9 aa, Artificial Sequence
  HA-1
  SITE (3)..(3): Xaa is His or Arg
VLXDDLLEA

SEQ ID NO: 265 - protein, 6 aa, Artificial Sequence
  ITIM Consensus
  SITE (1)..(2): Xaa is Ser, Ile, Val or Leu
  SITE (2)..(2): Xaa is any amino acid
  SITE (4)..(5): Xaa is any amino acid
  SITE (6)..(6): Xaa is Ile, Val or Leu
XXYXXX

SEQ ID NO: 266 - protein, 242 aa, Artificial Sequence
  C-2096 CD19 ScFv
DIQMTQTTSSLSASLGDRVTISCRASQDISKYLNWYQQKPDGTVKLLIYHTSRLHSGVPSRFSGSGSGTDYSLTISNLEQEDIATYFCQQGNTLPYTFGGGTKLEITGGGGSGGGGSGGGGSEVKLQESGPGLVAPSQSLSVTCTVSGVSLPDYGVSWIRQPPRKGLEWLGVIWGSETTYYNSALKSRLTIIKDNSKSQVFLKMNSLQTDDTAIYYCAKHYYYGGSYAMDYWGQGTSVTVSS

SEQ ID NO: 267 - DNA, 726 bp, Artificial Sequence
  C-2096 CD19 ScFv
gacatccagatgacacagactacatcctccctgtctgcctctctgggagacagagtcaccatcagttgcagggcaagtcaggacattagtaaatatttaaattggtatcagcagaaaccagatggaactgttaaactcctgatctaccatacatcaagattacactcaggagtcccatcaaggttcagtggcagtgggtctggaacagattattctctcaccattagcaacctggagcaagaagatattgccacttacttttgccaacagggtaatacgcttccgtacacgttcggaggggggaccaagctggagatcacaggtggcggtggctcgggcggtggtgggtcgggtggcggcggatctgaggtgaaactgcaggagtcaggacctggcctggtggcgccctcacagagcctgtccgtcacatgcactgtctcaggggtctcattacccgactatggtgtaagctggattcgccagcctccacgaaagggtctggagtggctgggagtaatatggggtagtgaaaccacatactataattcagctctcaaatccagactgaccatcatcaaggacaactccaagagccaagttttcttaaaaatgaacagtctgcaaactgatgacacagccatttactactgtgccaaacattattactacggtggtagctatgctatggactactggggccaaggaacctcagtcaccgtgtcctca

SEQ ID NO: 268 - protein, 244 aa, Artificial Sequence
  C-2815 CD19 ScFv
DIQMTQTTSSLSASLGDRVTISCRASQDISKYLNWYQQKPDGTVKLLIYHTSRLHSGVPSRFSGSGSGTDYSLTISNLEQEDIATYFCQQGNTLPYTFGGGTKLEITGGGGSGGGGSGGGGSGGEVKLQESGPGLVAPSQSLSVTCTVSGVSLPDYGVSWIRQPPRKGLEWLGVIWGSETTYYNSALKSRLTIIKDNSKSQVFLKMNSLQTDDTAIYYCAKHYYYGGSYAMDYWGQGTSVTVSS

SEQ ID NO: 269 - DNA, 732 bp, Artificial Sequence
  C-2815 CD19 ScFv
gacatccagatgacacagactacatcctccctgtctgcctctctgggagacagagtcaccatcagttgcagggcaagtcaggacattagtaaatatttaaattggtatcagcagaaaccagatggaactgttaaactcctgatctaccatacatcaagattacactcaggagtcccatcaaggttcagtggcagtgggtctggaacagattattctctcaccattagcaacctggagcaagaagatattgccacttacttttgccaacagggtaatacgcttccgtacacgttcggaggggggaccaagctggagatcacaggcggaggtggaagcggagggggaggatctggcggcggaggaagcggaggcgaggtgaaactgcaggagtcaggacctggcctggtggcgccctcacagagcctgtccgtcacatgcactgtctcaggggtctcattacccgactatggtgtaagctggattcgccagcctccacgaaagggtctggagtggctgggagtaatatggggtagtgaaaccacatactataattcagctctcaaatccagactgaccatcatcaaggacaactccaagagccaagttttcttaaaaatgaacagtctgcaaactgatgacacagccatttactactgtgccaaacattattactacggtggtagctatgctatggactactggggccaaggaacctcagtcaccgtgtcctca

SEQ ID NO: 270 - protein, 509 aa, Artificial Sequence
  CD19 CAR
DIQMTQTTSSLSASLGDRVTISCRASQDISKYLNWYQQKPDGTVKLLIYHTSRLHSGVPSRFSGSGSGTDYSLTISNLEQEDIATYFCQQGNTLPYTFGGGTKLEITGGGGSGGGGSGGGGSEVKLQESGPGLVAPSQSLSVTCTVSGVSLPDYGVSWIRQPPRKGLEWLGVIWGSETTYYNSALKSRLTIIKDNSKSQVFLKMNSLQTDDTAIYYCAKHYYYGGSYAMDYWGQGTSVTVSSTTTPAPRPPTPAPTIASQPLSLRPEACRPAAGGAVHTRGLDFACDFWVLVVVGGVLACYSLLVTVAFIIFWVRSKRSRLLHSDYMNMTPRRPGPTRKHYQPYAPPRDFAAYRSKRGRKKLLYIFKQPFMRPVQTTQEEDGCSCRFPEEEEGGCELRVKFSRSADAPAYKQGQNQLYNELNLGRREEYDVLDKRRGRDPEMGGKPRRKNPQEGLYNELQKDKMAEAYSEIGMKGERRRGKGHDGLYQGLSTATKDTYDALHMQALPPR

SEQ ID NO: 271 - DNA, 1527 bp, Artificial Sequence
  CD19 CAR
gacatccagatgacacagactacatcctccctgtctgcctctctgggagacagagtcaccatcagttgcagggcaagtcaggacattagtaaatatttaaattggtatcagcagaaaccagatggaactgttaaactcctgatctaccatacatcaagattacactcaggagtcccatcaaggttcagtggcagtgggtctggaacagattattctctcaccattagcaacctggagcaagaagatattgccacttacttttgccaacagggtaatacgcttccgtacacgttcggaggggggaccaagctggagatcacaggtggcggtggctcgggcggtggtgggtcgggtggcggcggatctgaggtgaaactgcaggagtcaggacctggcctggtggcgccctcacagagcctgtccgtcacatgcactgtctcaggggtctcattacccgactatggtgtaagctggattcgccagcctccacgaaagggtctggagtggctgggagtaatatggggtagtgaaaccacatactataattcagctctcaaatccagactgaccatcatcaaggacaactccaagagccaagttttcttaaaaatgaacagtctgcaaactgatgacacagccatttactactgtgccaaacattattactacggtggtagctatgctatggactactggggccaaggaacctcagtcaccgtgtcctcaaccacgacgccagcgccgcgaccaccaacaccggcgcccaccatcgcgtcgcagcccctgtccctgcgcccagaggcgtgccggccagcggcggggggcgcagtgcacacgagggggctggacttcgcctgtgatttctgggtgctggtcgttgtgggcggcgtgctggcctgctacagcctgctggtgacagtggccttcatcatcttttgggtgaggagcaagcggagcagactgctgcacagcgactacatgaacatgaccccccggaggcctggccccacccggaagcactaccagccctacgcccctcccagggatttcgccgcctaccggagcaaacggggcagaaagaaactcctgtatatattcaaacaaccatttatgaggccagtacaaactactcaagaggaagatggctgtagctgccgatttccagaagaagaagaaggaggatgtgaactgagagtgaagttcagcaggagcgcagacgcccccgcgtacaagcagggccagaaccagctctataacgagctcaatctaggacgaagagaggagtacgatgttttggacaagcgtagaggccgggaccctgagatggggggaaagccgagaaggaagaaccctcaggaaggcctgtacaatgaactgcagaaagataagatggcggaggcctacagtgagattgggatgaaaggcgagcgccggaggggcaaggggcacgatggcctttaccagggactcagtacagccaccaaggacacctacgacgcccttcacatgcaggccctgccccctcgc

SEQ ID NO: 272 - protein, 509 aa, Artificial Sequence; identical to SEQ ID NO: 270
  CD19 CAR

SEQ ID NO: 273 - protein, 246 aa, Artificial Sequence
  CT618 CEA ScFv
QVQLVQSGSELKKPGASVKVSCKASGYTFTEFGMNWVRQAPGQGLEWMGWINTKTGEATYVEEFKGRFVFSLDTSVSTAYLQISSLKAEDTAVYYCARWDFAYYVEAMDYWGQGTTVTVSSGGGGSGGGGSGGGGSGGDIQMTQSPSSLSASVGDRVTITCKASQNVGTNVAWYQQKPGKAPKLLIYSASYRYSGVPSRFSGSGSGTDFTLTISSLQPEDFATYYCHQYYTYPLFTFGQGTKLEIK

SEQ ID NO: 274 - DNA, 1542 bp, Artificial Sequence
  CT618 CEA ScFv
caggtgcagctggtgcaatctgggtctgagttgaagaagcctggggcctcagtgaaggtttcctgcaaggcttctggatacaccttcactgagtttggaatgaactgggtgcgacaggcccctggacaagggcttgagtggatgggatggataaacaccaaaactggagaggcaacatatgttgaagagtttaagggacggtttgtcttctccttggacacctctgtcagcacggcatatctgcagatcagcagcctaaaggctgaagacactgccgtgtattactgtgcgagatgggacttcgcttattacgtggaggctatggactactggggccaagggaccacggtcaccgtctcctcaggcggaggtggaagcggagggggaggatctggcggcggaggaagcggaggcgatatccagatgacccagtctccatcctccctgtctgcatctgtgggagacagagtcaccatcacttgcaaggccagtcagaatgtgggtactaatgttgcctggtatcagcagaaaccagggaaagcacctaagctcctgatctattcggcatcctaccgctacagtggagtcccatcaaggttcagtggcagtggatctgggacagatttcactctcaccatcagcagtctgcaacctgaagatttcgcaacttactactgtcaccaatattacacctatcctctattcacgtttggccagggcaccaagctcgagatcaagatggacatgagggtccccgctcagctcctggggctcctgctactctggctccgaggtgccagatgtcaggtgcagctggtgcaatctgggtctgagttgaagaagcctggggcctcagtgaaggtttcctgcaaggcttctggatacaccttcactgagtttggaatgaactgggtgcgacaggcccctggacaagggcttgagtggatgggatggataaacaccaaaactggagaggcaacatatgttgaagagtttaagggacggtttgtcttctccttggacacctctgtcagcacggcatatctgcagatcagcagcctaaaggctgaagacactgccgtgtattactgtgcgagatgggacttcgcttattacgtggaggctatggactactggggccaagggaccacggtcaccgtctcctcaggcggaggtggaagcggagggggaggatctggcggcggaggaagcggaggcgatatccagatgacccagtctccatcctccctgtctgcatctgtgggagacagagtcaccatcacttgcaaggccagtcagaatgtgggtactaatgttgcctggtatcagcagaaaccagggaaagcacctaagctcctgatctattcggcatcctaccgctacagtggagtcccatcaaggttcagtggcagtggatctgggacagatttcactctcaccatcagcagtctgcaacctgaagatttcgcaacttactactgtcaccaatattacacctatcctctattcacgtttggccagggcaccaagctcgagatcaag

SEQ ID NO: 275 - protein, 246 aa, Artificial Sequence
  CT619 CEA ScFv
QVQLVQSGAEVKKPGASVKVSCKASGYTFTEFGMNWVRQAPGQGLEWMGWINTKTGEATYVEEFKGRVTFTTDTSTSTAYMELRSLRSDDTAVYYCARWDFAYYVEAMDYWGQGTTVTVSSGGGGSGGGGSGGGGSGGDIQMTQSPSSLSASVGDRVTITCKASAAVGTYVAWYQQKPGKAPKLLIYSASYRKRGVPSRFSGSGSGTDFTLTISSLQPEDFATYYCHQYYTYPLFTFGQGTKLEIK

SEQ ID NO: 276 - DNA, 738 bp, Artificial Sequence
  CT619 CEA ScFv
caggtgcagctggtgcagtctggcgccgaagtgaagaaacctggagctagtgtgaaggtgtcctgcaaggccagcggctacaccttcaccgagttcggcatgaactgggtccgacaggctccaggccagggcctcgaatggatgggctggatcaacaccaagaccggcgaggccacctacgtggaagagttcaagggcagagtgaccttcaccacggacaccagcaccagcaccgcctacatggaactgcggagcctgagaagcgacgacaccgccgtgtactactgcgccagatgggacttcgcttattacgtggaagccatggactactggggccagggcaccaccgtgaccgtgtctagcggcggaggtggaagcggagggggaggatctggcggcggaggaagcggaggcgatatccagatgacccagtctccatcctccctgtctgcatctgtgggagacagagtcaccatcacttgcaaggccagtgcggctgtgggtacgtatgttgcgtggtatcagcagaaaccagggaaagcacctaagctcctgatctattcggcatcctaccgcaaaaggggagtcccatcaaggttcagtggcagtggatctgggacagatttcactctcaccatcagcagtctgcaacctgaagatttcgcaacttactactgtcaccaatattacacctatcctctattcacgtttggccagggcaccaagctcgagatcaag

SEQ ID NO: 277 - protein, 246 aa, Artificial Sequence
  CT620 CEA ScFv
QVQLVQSGSELKKPGASVKVSCKASGYTFTEFGMNWVRQAPGQGLEWMGWINTKTGEATYVEEFKGRFVFSLDTSVSTAYLQISSLKAEDTAVYYCARWDFAHYFQTMDYWGQGTTVTVSSGGGGSGGGGSGGGGSGGDIQMTQSPSSLSASVGDRVTITCKASAAVGTYVAWYQQKPGKAPKLLIYSASYRKRGVPSRFSGSGSGTDFTLTISSLQPEDFATYYCHQYYTYPLFTFGQGTKLEIK

SEQ ID NO: 278 - DNA, 738 bp, Artificial Sequence
  CT620 CEA ScFv
caggtgcagctggtgcaatctgggtctgagttgaagaagcctggggcctcagtgaaggtttcctgcaaggcttctggatacaccttcactgagtttggaatgaactgggtgcgacaggcccctggacaagggcttgagtggatgggatggataaacaccaaaactggagaggcaacatatgttgaagagtttaagggacggtttgtcttctccttggacacctctgtcagcacggcatatctgcagatcagcagcctaaaggctgaagacactgccgtgtattactgtgcgagatgggactttgctcattactttcagactatggactactggggccaagggaccacggtcaccgtctcctcaggcggaggtggaagcggagggggaggatctggcggcggaggaagcggaggcgatatccagatgacccagtctccatcctccctgtctgcatctgtgggagacagagtcaccatcacttgcaaggccagtgcggctgtgggtacgtatgttgcgtggtatcagcagaaaccagggaaagcacctaagctcctgatctattcggcatcctaccgcaaaaggggagtcccatcaaggttcagtggcagtggatctgggacagatttcactctcaccatcagcagtctgcaacctgaagatttcgcaacttactactgtcaccaatattacacctatcctctattcacgtttggccagggcaccaagctcgagatcaag

SEQ ID NO: 279 - protein, 535 aa, Artificial Sequence
  CEA CAR
MDMRVPAQLLGLLLLWLRGARCQVQLVQSGSELKKPGASVKVSCKASGYTFTEFGMNWVRQAPGQGLEWMGWINTKTGEATYVEEFKGRFVFSLDTSVSTAYLQISSLKAEDTAVYYCARWDFAYYVEAMDYWGQGTTVTVSSGGGGSGGGGSGGGGSGGDIQMTQSPSSLSASVGDRVTITCKASQNVGTNVAWYQQKPGKAPKLLIYSASYRYSGVPSRFSGSGSGTDFTLTISSLQPEDFATYYCHQYYTYPLFTFGQGTKLEIKTTTPAPRPPTPAPTIASQPLSLRPEACRPAAGGAVHTRGLDFACDFWVLVVVGGVLACYSLLVTVAFIIFWVRSKRSRLLHSDYMNMTPRRPGPTRKHYQPYAPPRDFAAYRSKRGRKKLLYIFKQPFMRPVQTTQEEDGCSCRFPEEEEGGCELRVKFSRSADAPAYKQGQNQLYNELNLGRREEYDVLDKRRGRDPEMGGKPRRKNPQEGLYNELQKDKMAEAYSEIGMKGERRRGKGHDGLYQGLSTATKDTYDALHMQALPPR

SEQ ID NO: 280 - DNA, 1608 bp, Artificial Sequence
  CEA CAR
atggacatgagggtccccgctcagctcctggggctcctgctactctggctccgaggtgccagatgtcaggtgcagctggtgcaatctgggtctgagttgaagaagcctggggcctcagtgaaggtttcctgcaaggcttctggatacaccttcactgagtttggaatgaactgggtgcgacaggcccctggacaagggcttgagtggatgggatggataaacaccaaaactggagaggcaacatatgttgaagagtttaagggacggtttgtcttctccttggacacctctgtcagcacggcatatctgcagatcagcagcctaaaggctgaagacactgccgtgtattactgtgcgagatgggacttcgcttattacgtggaggctatggactactggggccaagggaccacggtcaccgtctcctcaggcggaggtggaagcggagggggaggatctggcggcggaggaagcggaggcgatatccagatgacccagtctccatcctccctgtctgcatctgtgggagacagagtcaccatcacttgcaaggccagtcagaatgtgggtactaatgttgcctggtatcagcagaaaccagggaaagcacctaagctcctgatctattcggcatcctaccgctacagtggagtcccatcaaggttcagtggcagtggatctgggacagatttcactctcaccatcagcagtctgcaacctgaagatttcgcaacttactactgtcaccaatattacacctatcctctattcacgtttggccagggcaccaagctcgagatcaagacaacgacgccagctccccgcccgccaacccctgcacctacgattgcatcacaaccgctgtccctgcggcctgaagcttgtcgcccagccgcaggtggcgccgtacatacacgggggctggattttgcctgtgatttctgggtgctggtcgttgtgggcggcgtgctggcctgctacagcctgctggtgacagtggccttcatcatcttttgggtgaggagcaagcggagtcgactgctgcacagcgactacatgaacatgaccccccggaggcctggccccacccggaagcactaccagccctacgcccctcccagggatttcgccgcctaccggagcaaacggggcagaaagaaactcctgtatatattcaaacaaccatttatgaggccagtacaaactactcaagaggaagatggctgtagctgccgatttccagaagaagaagaaggaggatgtgaactgagagtgaagttcagcaggagcgcagacgcccccgcgtacaagcagggccagaaccagctctataacgagctcaatctaggacgaagagaggagtacgatgttttggacaagcgtagaggccgggaccctgagatggggggaaagccgagaaggaagaaccctcaggaaggcctgtacaatgaactgcagaaagataagatggcggaggcctacagtgagattgggatgaaaggcgagcgccggaggggcaaggggcacgatggcctttaccagggactcagtacagccaccaaggacacctacgacgcccttcacatgcaggccctgccccctcgctag

SEQ ID NO: 281 - protein, 537 aa, Artificial Sequence
  CEA CAR
MDMRVPAQLLGLLLLWLRGARCQVQLVQSGAEVKKPGASVKVSCKASGYTFTEFGMNWVRQAPGQGLEWMGWINTKTGEATYVEEFKGRVTFTTDTSTSTAYMELRSLRSDDTAVYYCARWDFAYYVEAMDYWGQGTTVTVSSGGGGSGGGGSGGGGSGGDIQMTQSPSSLSASVGDRVTITCKASAAVGTYVAWYQQKPGKAPKLLIYSASYRKRGVPSRFSGSGSGTDFTLTISSLQPEDFATYYCHQYYTYPLFTFGQGTKLEIKRTTTTPAPRPPTPAPTIASQPLSLRPEACRPAAGGAVHTRGLDFACDFWVLVVVGGVLACYSLLVTVAFIIFWVRSKRSRLLHSDYMNMTPRRPGPTRKHYQPYAPPRDFAAYRSKRGRKKLLYIFKQPFMRPVQTTQEEDGCSCRFPEEEEGGCELRVKFSRSADAPAYKQGQNQLYNELNLGRREEYDVLDKRRGRDPEMGGKPRRKNPQEGLYNELQKDKMAEAYSEIGMKGERRRGKGHDGLYQGLSTATKDTYDALHMQALPPR

SEQ ID NO: 282 - DNA, 1614 bp, Artificial Sequence
  CEA CAR
atggacatgagggtccccgctcagctcctggggctcctgctactctggctccgaggtgccagatgtcaggtgcagctggtgcagtctggcgccgaagtgaagaaacctggagctagtgtgaaggtgtcctgcaaggccagcggctacaccttcaccgagttcggcatgaactgggtccgacaggctccaggccagggcctcgaatggatgggctggatcaacaccaagaccggcgaggccacctacgtggaagagttcaagggcagagtgaccttcaccacggacaccagcaccagcaccgcctacatggaactgcggagcctgagaagcgacgacaccgccgtgtactactgcgccagatgggacttcgcttattacgtggaagccatggactactggggccagggcaccaccgtgaccgtgtctagcggcggaggtggaagcggagggggaggatctggcggcggaggaagcggaggcgatatccagatgacccagtctccatcctccctgtctgcatctgtgggagacagagtcaccatcacttgcaaggccagtgcggctgtgggtacgtatgttgcgtggtatcagcagaaaccagggaaagcacctaagctcctgatctattcggcatcctaccgcaaaaggggagtcccatcaaggttcagtggcagtggatctgggacagatttcactctcaccatcagcagtctgcaacctgaagatttcgcaacttactactgtcaccaatattacacctatcctctattcacgtttggccagggcaccaagctcgagatcaagcgtacgacaacgacgccagctccccgcccgccaacccctgcacctacgattgcatcacaaccgctgtccctgcggcctgaagcttgtcgcccagccgcaggtggcgccgtacatacacgggggctggattttgcctgtgatttctgggtgctggtcgttgtgggcggcgtgctggcctgctacagcctgctggtgacagtggccttcatcatcttttgggtgaggagcaagcggagtcgactgctgcacagcgactacatgaacatgaccccccggaggcctggccccacccggaagcactaccagccctacgcccctcccagggatttcgccgcctaccggagcaaacggggcagaaagaaactcctgtatatattcaaacaaccatttatgaggccagtacaaactactcaagaggaagatggctgtagctgccgatttccagaagaagaagaaggaggatgtgaactgagagtgaagttcagcaggagcgcagacgcccccgcgtacaagcagggccagaaccagctctataacgagctcaatctaggacgaagagaggagtacgatgttttggacaagcgtagaggccgggaccctgagatggggggaaagccgagaaggaagaaccctcaggaaggcctgtacaatgaactgcagaaagataagatggcggaggcctacagtgagattgggatgaaaggcgagcgccggaggggcaaggggcacgatggcctttaccagggactcagtacagccaccaaggacacctacgacgcccttcacatgcaggccctgccccctcgctag

SEQ ID NO: 283 - protein, 536 aa, Artificial Sequence
  CEA CAR
MDMRVPAQLLGLLLLWLRGARCQVQLVQSGSELKKPGASVKVSCKASGYTFTEFGMNWVRQAPGQGLEWMGWINTKTGEATYVEEFKGRFVFSLDTSVSTAYLQISSLKAEDTAVYYCARWDFAHYFQTMDYWGQGTTVTVSSGGGGSGGGGSGGGGSGGDIQMTQSPSSLSASVGDRVTITCKASAAVGTYVAWYQQKPGKAPKLLIYSASYRKRGVPSRFSGSGSGTDFTLTISSLQPEDFATYYCHQYYTYPLFTFGQGTKLEIKRTTTPAPRPPTPAPTIASQPLSLRPEACRPAAGGAVHTRGLDFACDFWVLVVVGGVLACYSLLVTVAFIIFWVRSKRSRLLHSDYMNMTPRRPGPTRKHYQPYAPPRDFAAYRSKRGRKKLLYIFKQPFMRPVQTTQEEDGCSCRFPEEEEGGCELRVKFSRSADAPAYKQGQNQLYNELNLGRREEYDVLDKRRGRDPEMGGKPRRKNPQEGLYNELQKDKMAEAYSEIGMKGERRRGKGHDGLYQGLSTATKDTYDALHMQALPPR

SEQ ID NO: 284 - DNA, 1611 bp, Artificial Sequence
  CEA CAR
atggacatgagggtccccgctcagctcctggggctcctgctactctggctccgaggtgccagatgtcaggtgcagctggtgcaatctgggtctgagttgaagaagcctggggcctcagtgaaggtttcctgcaaggcttctggatacaccttcactgagtttggaatgaactgggtgcgacaggcccctggacaagggcttgagtggatgggatggataaacaccaaaactggagaggcaacatatgttgaagagtttaagggacggtttgtcttctccttggacacctctgtcagcacggcatatctgcagatcagcagcctaaaggctgaagacactgccgtgtattactgtgcgagatgggactttgctcattactttcagactatggactactggggccaagggaccacggtcaccgtctcctcaggcggaggtggaagcggagggggaggatctggcggcggaggaagcggaggcgatatccagatgacccagtctccatcctccctgtctgcatctgtgggagacagagtcaccatcacttgcaaggccagtgcggctgtgggtacgtatgttgcgtggtatcagcagaaaccagggaaagcacctaagctcctgatctattcggcatcctaccgcaaaaggggagtcccatcaaggttcagtggcagtggatctgggacagatttcactctcaccatcagcagtctgcaacctgaagatttcgcaacttactactgtcaccaatattacacctatcctctattcacgtttggccagggcaccaagctcgagatcaagcgtacaacgacgccagctccccgcccgccaacccctgcacctacgattgcatcacaaccgctgtccctgcggcctgaagcttgtcgcccagccgcaggtggcgccgtacatacacgggggctggattttgcctgtgatttctgggtgctggtcgttgtgggcggcgtgctggcctgctacagcctgctggtgacagtggccttcatcatcttttgggtgaggagcaagcggagtcgactgctgcacagcgactacatgaacatgaccccccggaggcctggccccacccggaagcactaccagccctacgcccctcccagggatttcgccgcctaccggagcaaacggggcagaaagaaactcctgtatatattcaaacaaccatttatgaggccagtacaaactactcaagaggaagatggctgtagctgccgatttccagaagaagaagaaggaggatgtgaactgagagtgaagttcagcaggagcgcagacgcccccgcgtacaagcagggccagaaccagctctataacgagctcaatctaggacgaagagaggagtacgatgttttggacaagcgtagaggccgggaccctgagatggggggaaagccgagaaggaagaaccctcaggaaggcctgtacaatgaactgcagaaagataagatggcggaggcctacagtgagattgggatgaaaggcgagcgccggaggggcaaggggcacgatggcctttaccagggactcagtacagccaccaaggacacctacgacgcccttcacatgcaggccctgccccctcgctag

SEQ ID NO: 285 - protein, 5 aa, Artificial Sequence
  CEA Binder HCDR1
EFGMN

SEQ ID NO: 286 - protein, 17 aa, Artificial Sequence
  CEA Binder HCDR2
WINTKTGEATYVEEFKG

SEQ ID NO: 287 - protein, 12 aa, Artificial Sequence
  CEA Binder HCDR3
WDFAYYVEAMDY

SEQ ID NO: 288 - protein, 12 aa, Artificial Sequence
  CEA Binder HCDR3
WDFAHYFQTMDY

SEQ ID NO: 289 - protein, 11 aa, Artificial Sequence
  CEA Binder LCDR1
KASQNVGTNVA

SEQ ID NO: 290 - protein, 11 aa, Artificial Sequence
  CEA Binder LCDR1
KASAAVGTYVA

SEQ ID NO: 291 - protein, 7 aa, Artificial Sequence
  CEA Binder LCDR2
SASYRYS

SEQ ID NO: 292 - protein, 7 aa, Artificial Sequence
  CEA Binder LCDR2
SASYRKR

SEQ ID NO: 293 - protein, 10 aa, Artificial Sequence
  CEA Binder LCDR3
HQYYTYPLFT

SEQ ID NO: 294 - protein, 10 aa, Artificial Sequence
  LB-CYBA-1Y
  SITE (10)..(10): Xaa is Tyr or His
STMERWGQKX

SEQ ID NO: 295 - protein, 11 aa, Artificial Sequence
  LB-OAS1-1R
  SITE (7)..(7): Xaa is Arg or Thr
ETDDPRXYQKY

SEQ ID NO: 296 - protein, 9 aa, Artificial Sequence
  HA-2
  SITE (9)..(9): Xaa is Val or Met
YIGEVLVSX

SEQ ID NO: 297 - protein, 9 aa, Artificial Sequence
  HA-8
  SITE (1)..(1): Xaa is Arg or Pro
XTLDKVLEV

SEQ ID NO: 298 - protein, 9 aa, Artificial Sequence
  HA-3
  SITE (2)..(2): Xaa is Thr or Met
VXEPGTAQY

SEQ ID NO: 299 - protein, 11 aa, Artificial Sequence
  HwA11-S
  SITE (6)..(6): Xaa is Ser or Thr
CIPPDXLLFPA

SEQ ID NO: 300 - protein, 11 aa, Artificial Sequence
  LB-ADIR-1F
  SITE (9)..(9): Xaa is Phe or Ser
SVAPALALXPA

SEQ ID NO: 301 - protein, 9 aa, Artificial Sequence
  LB-HIVEP1-1S
  SITE (6)..(6): Xaa is Ser or Asn
SLPKHXVTI

SEQ ID NO: 302 - protein, 9 aa, Artificial Sequence
  LB-NISCH-1A
  SITE (7)..(7): Xaa is Ala or Val
ALAPAPXEV

SEQ ID NO: 303 - protein, 9 aa, Artificial Sequence
  LB-SSR1-1S
  SITE (1)..(1): Xaa is Ser or Leu
XLAVAQDLT

SEQ ID NO: 304 - protein, 10 aa, Artificial Sequence
  LB-WNK1-1I
  SITE (7)..(7): Xaa is Ile or Met
RTLSPEXITV

SEQ ID NO: 305 - protein, 10 aa, Artificial Sequence
  T4A
  SITE (10)..(10): Xaa is Ala or Glu
GLYTYWSAGX

SEQ ID NO: 306 - protein, 9 aa, Artificial Sequence
  UTA2-1
  SITE (3)..(3): Xaa is Leu or Pro
QLXNSVLTL

SEQ ID NO: 307 - protein, 9 aa, Artificial Sequence
  LB-CLYBL-1Y
  SITE (5)..(5): Xaa is Tyr or Asp
SLAAXIPRL

SEQ ID NO: 308 - protein, 10 aa, Artificial Sequence
  TRIM22
  SITE (7)..(7): Xaa is Cys or Arg
MAVPPCXIGV

SEQ ID NO: 309 - protein, 11 aa, Artificial Sequence
  PARP10-1L
  SITE (3)..(3): Xaa is Leu or Pro
GLXGQEGLVEI

SEQ ID NO: 310 - protein, 9 aa, Artificial Sequence
  FAM119A-1T
  SITE (8)..(8): Xaa is Thr or Ile
AMLERQFXV

SEQ ID NO: 311 - protein, 9 aa, Artificial Sequence
  GLRX3-1S
  SITE (3)..(3): Xaa is Ser or Pro
FLXSANEHL

SEQ ID NO: 312 - protein, 9 aa, Artificial Sequence
  HNF4G-1M
  SITE (2)..(2): Xaa is Met or Ile
MXYKDILLL

SEQ ID NO: 313 - protein, 9 aa, Artificial Sequence
  HMMR-1V
  SITE (6)..(6): Xaa is Val or Ala
SLQEKXAKA

SEQ ID NO: 314 - protein, 9 aa, Artificial Sequence
  BCL2A1
  SITE (4)..(4): Xaa is Asn or Lys
VLQXVAFSV

SEQ ID NO: 315 - protein, 10 aa, Artificial Sequence
  CDC26-1F
  SITE (1)..(1): Xaa is Phe or Ser
XVAGTQEVFV

SEQ ID NO: 316 - protein, 10 aa, Artificial Sequence
  APOBEC3F-1S/A
  SITE (3)..(3): Xaa is Ser or Ala
FLXEHPNVTL

SEQ ID NO: 317 - protein, 9 aa, Artificial Sequence
  LB-PRCP-1D
  SITE (8)..(8): Xaa is Asp or Glu
FMWDVAEXL

SEQ ID NO: 318 - protein, 11 aa, Artificial Sequence
  LB-PRCP-1D
  SITE (8)..(8): Xaa is Asp or Glu
FMWDVAEXLKA

SEQ ID NO: 319 - protein, 9 aa, Artificial Sequence
  LB-CCL4-1T
  SITE (7)..(7): Xaa is Thr or Ser
CADPSEXWV

SEQ ID NO: 320 - protein, 9 aa, Artificial Sequence
  LB-NCAPD3-1Q
  SITE (3)..(3): Xaa is Gln or Arg
WLXGVVPVV

SEQ ID NO: 321 - protein, 9 aa, Artificial Sequence
  LB-NDC80-1P
  SITE (7)..(7): Xaa is Pro or Ala
HLEEQIXKV

SEQ ID NO: 322 - protein, 9 aa, Artificial Sequence
  LB-TTK-1D
  SITE (4)..(4): Xaa is Asp or Glu
RLHXGRVFV

SEQ ID NO: 323 - protein, 9 aa, Artificial Sequence
  WDR27-1L
  SITE (2)..(2): Xaa is Leu or Pro
SXDDHVVAV

SEQ ID NO: 324 - protein, 11 aa, Artificial Sequence
  MIIP
  SITE (8)..(8): Xaa is Lys or Glu
SEESAVPXRSW

SEQ ID NO: 325 - protein, 10 aa, Artificial Sequence
  MIIP
  SITE (7)..(7): Xaa is Lys or Glu
EESAVPXRSW

SEQ ID NO: 326 - protein, 9 aa, Artificial Sequence
  LB-DHX33-1C
  SITE (9)..(9): Xaa is Cys or Arg
YLYEGGISX

SEQ ID NO: 327 - protein, 10 aa, Artificial Sequence
  PANE1
RVWDLPGVLK

SEQ ID NO: 328 - protein, 10 aa, Artificial Sequence
  SP110
  SITE (4)..(4): Xaa is Arg or Gly
SLPXGTSTPK

SEQ ID NO: 329 - protein, 9 aa, Artificial Sequence
  ACC-1C/Y
  SITE (5)..(5): Xaa is Tyr or Cys
DYLQXVLQI

SEQ ID NO: 330 - protein, 9 aa, Artificial Sequence
  P2RX7
  SITE (6)..(6): Xaa is His or Arg
WFHHCXPKY

SEQ ID NO: 331 - protein, 9 aa, Artificial Sequence
  ACC-4
  SITE (9)..(9): Xaa is Arg or Gly
ATLPLLCAX

SEQ ID NO: 332 - protein, 10 aa, Artificial Sequence
  ACC-5
  SITE (10)..(10): Xaa is Arg or Gly
WATLPLLCAX

SEQ ID NO: 333 - protein, 9 aa, Artificial Sequence
  AKAP13
  SITE (9)..(9): Xaa is Met or Thr
APAGVREVX

SEQ ID NO: 334 - protein, 10 aa, Artificial Sequence
  LB-APOBEC3B-1K
  SITE (1)..(1): Xaa is Lys or Glu
XPQYHAEMCF

SEQ ID NO: 335 - protein, 9 aa, Artificial Sequence
  APOBEC3H
  SITE (5)..(5): Xaa is Lys or Glu
KPQQXGLRL

SEQ ID NO: 336 - protein, 9 aa, Artificial Sequence
  LB-ARHGDIB-1R
  SITE (7)..(7): Xaa is Arg or Pro
LPRACWXEA

SEQ ID NO: 337 - protein, 11 aa, Artificial Sequence
  LB-BCAT2-1R
  SITE (3)..(3): Xaa is Arg or Thr
QPXRALLFVIL

SEQ ID NO: 338 - protein, 11 aa, Artificial Sequence
  BFAR
  SITE (11)..(11): Xaa is Met or Arg
APNTGRANQQX

SEQ ID NO: 339 - protein, 11 aa, Artificial Sequence
  C14orf169
  SITE (4)..(4): Xaa is Ala or Val
RPRXPTEELAL

SEQ ID NO: 340 - protein, 11 aa, Artificial Sequence
  LB-C16ORF-1R
  SITE (1)..(1): Xaa is Arg or Trp
XPCPSVGLSFL

SEQ ID NO: 341 - protein, 9 aa, Artificial Sequence
  C18orf21
  SITE (6)..(6): Xaa is Ala or Thr
NPATPXSKL

SEQ ID NO: 342 - protein, 10 aa, Artificial Sequence
  LB-EBI3-1I
  SITE (8)..(8): Xaa is Ile or Val
RPRARYYXQV

SEQ ID NO: 343 - protein, 9 aa, Artificial Sequence
  POP1
  SITE (7)..(7): Xaa is Asn or Lys
LPQKKSXAL

SEQ ID NO: 344 - protein, 9 aa, Artificial Sequence
  SCRIB
  SITE (7)..(7): Xaa is Leu or Pro
LPQQPPXSL

SEQ ID NO: 345 - protein, 9 aa, Artificial Sequence
  MTRR
  SITE (5)..(5): Xaa is Ser or Leu
SPASXRTDL

SEQ ID NO: 346 - protein, 9 aa, Artificial Sequence
  LLGL2
  SITE (5)..(5): Xaa is Arg or His
SPSLXILAI

SEQ ID NO: 347 - protein, 11 aa, Artificial Sequence
  LB-ECGF-1H
  SITE (3)..(3): Xaa is His or Arg
RPXAIRRPLAL

SEQ ID NO: 348 - protein, 11 aa, Artificial Sequence
  LB-ERAP1-1R
  SITE (3)..(3): Xaa is Arg or Pro
HPXQEQIALLA

SEQ ID NO: 349 - protein, 9 aa, Artificial Sequence
  LB-ERAP1-1R
  SITE (3)..(3): Xaa is Arg or Pro
HPXQEQIAL

SEQ ID NO: 350 - protein, 9 aa, Artificial Sequence
  LB-FUCA2-1V
  SITE (5)..(5): Xaa is Val or Met
RLRQXGSWL

SEQ ID NO: 351 - protein, 9 aa, Artificial Sequence
  LB-GEMIN4-1V
  SITE (9)..(9): Xaa is Val or Glue
FPALRFVEX

SEQ ID NO: 352 - protein, 11 aa, Artificial Sequence
  HDGF
  SITE (11)..(11): Xaa is Leu or Pro
LPMEVEKNSTX

SEQ ID NO: 353 - protein, 11 aa, Artificial Sequence
  LB-PDCD11-1F
  SITE (8)..(8): Xaa is Phe or Leu
GPDSSKTXLCL

SEQ ID NO: 354 - protein, 9 aa, Artificial Sequence
  LB-PFAS-1P
  SITE (2)..(2): Xaa is Pro or Ser
AXGHTRRKL

SEQ ID NO: 355 - protein, 10 aa, Artificial Sequence
  LB-TEP1-1S
  SITE (9)..(9): Xaa is Ser or Pro
APDGAKVAXL

SEQ ID NO: 356 - protein, 11 aa, Artificial Sequence
  LB-TMEM8A-1I
  SITE (7)..(7): Xaa is Ile or Val
RPRSVTXQPLL

SEQ ID NO: 357 - protein, 10 aa, Artificial Sequence
  LB-USP15-1I
  SITE (8)..(8): Xaa is Ile or Thr
MPSHLRNXLL

SEQ ID NO: 358 - protein, 9 aa, Artificial Sequence
  LRH-1
TPNQRQNVC

SEQ ID NO: 359 - protein, 9 aa, Artificial Sequence
  LB-MOB3A-1C
  SITE (1)..(1): Xaa is Cys or Ser
XPRPGTWTC

SEQ ID NO: 360 - protein, 11 aa, Artificial Sequence
  LB-ZDHHC6-1Y
  SITE (4)..(4): Xaa is Tyr or His
RPRXWILLVKI

SEQ ID NO: 361 - protein, 10 aa, Artificial Sequence
  ZAPHIR
IPRDSWWVEL

SEQ ID NO: 362 - protein, 9 aa, Artificial Sequence
  HEATR1
  SITE (7)..(7): Xaa is Glu or Gly
ISKERAXAL

SEQ ID NO: 363 - protein, 9 aa, Artificial Sequence
  LB-GSTP1-1V
  SITE (7)..(7): Xaa is Val or Ile
DLRCKYXSL

SEQ ID NO: 364 - protein, 9 aa, Artificial Sequence
  HA-1/B60
  SITE (6)..(6): Xaa is His or Arg
KECVLXDDL

SEQ ID NO: 365 - protein, 9 aa, Artificial Sequence
  LB-SON-1R
  SITE (6)..(6): Xaa is Arg or Cys
SETKQXTVL

SEQ ID NO: 366 - protein, 9 aa, Artificial Sequence
  LB-SWAP70-1Q
  SITE (6)..(6): Xaa is Gln or Glu
MEQLEXLEL

SEQ ID NO: 367 - protein, 9 aa, Artificial Sequence
  LB-TRIP10-1EPC
  SITE (2)..(2): Xaa is Glu or Gly
  SITE (3)..(3): Xaa is Pro or Ser
  SITE (7)..(7): Xaa is Cys or Gly
GXXQDLXTL

SEQ ID NO: 368 - protein, 9 aa, Artificial Sequence
  LB-NUP133-1R
  SITE (8)..(8): Xaa is Arg or Gln
SEDLILCXL

SEQ ID NO: 369 - protein, 11 aa, Artificial Sequence
  LB-ZNFX1-1Q
  SITE (8)..(8): Xaa is Gln or His
NEIEDVWXLDL

SEQ ID NO: 370 - protein, 11 aa, Artificial Sequence
  SLC1A5
  SITE (3)..(3): Xaa is Ala or Pro
AEXTANGGLAL

SEQ ID NO: 371 - protein, 10 aa, Artificial Sequence
  ACC-2
  SITE (6)..(6): Xaa is Asp or Gly
KEFEDXIINW

SEQ ID NO: 372 - protein, 11 aa, Artificial Sequence
  ACC-6
MEIFIEVFSHF

SEQ ID NO: 373 - protein, 10 aa, Artificial Sequence
  HB-1H/Y
  SITE (8)..(8): Xaa is His or Tyr
EEKRGSLXVW

SEQ ID NO: 374 - protein, 9 aa, Artificial Sequence
  DPH1
  SITE (2)..(2): Xaa is Val or Leu
SXLPEVDVW

SEQ ID NO: 375 - protein, 9 aa, Artificial Sequence
  UGT2B17/A02
CVATMIFMI

SEQ ID NO: 376 - protein, 10 aa, Artificial Sequence
  UGT2B17/A29
AELLNIPFLY

SEQ ID NO: 377 - protein, 9 aa, Artificial Sequence
  DFFRY
  SITE (4)..(4): Xaa is Cys or Ser
IVDXLTEMY

SEQ ID NO: 378 - protein, 9 aa, Artificial Sequence
  SMCY
FIDSYICQV

SEQ ID NO: 379 - protein, 11 aa, Artificial Sequence
  TMSB4Y
EVLLRPGLHFR

SEQ ID NO: 380 - DNA, 1533 bp, Artificial Sequence
  CD19 CAR
gacatccagatgacacagactacatcctccctgtctgcctctctgggagacagagtcaccatcagttgcagggcaagtcaggacattagtaaatatttaaattggtatcagcagaaaccagatggaactgttaaactcctgatctaccatacatcaagattacactcaggagtcccatcaaggttcagtggcagtgggtctggaacagattattctctcaccattagcaacctggagcaagaagatattgccacttacttttgccaacagggtaatacgcttccgtacacgttcggaggggggaccaagctggagatcacaggcggaggtggaagcggagggggaggatctggcggcggaggaagcggaggcgaggtgaaactgcaggagtcaggacctggcctggtggcgccctcacagagcctgtccgtcacatgcactgtctcaggggtctcattacccgactatggtgtaagctggattcgccagcctccacgaaagggtctggagtggctgggagtaatatggggtagtgaaaccacatactataattcagctctcaaatccagactgaccatcatcaaggacaactccaagagccaagttttcttaaaaatgaacagtctgcaaactgatgacacagccatttactactgtgccaaacattattactacggtggtagctatgctatggactactggggccaaggaacctcagtcaccgtgtcctcaaccacgacgccagcgccgcgaccaccaacaccggcgcccaccatcgcgtcgcagcccctgtccctgcgcccagaggcgtgccggccagcggcggggggcgcagtgcacacgagggggctggacttcgcctgtgatttctgggtgctggtcgttgtgggcggcgtgctggcctgctacagcctgctggtgacagtggccttcatcatcttttgggtgaggagcaagcggagcagactgctgcacagcgactacatgaacatgaccccccggaggcctggccccacccggaagcactaccagccctacgcccctcccagggatttcgccgcctaccggagcaaacggggcagaaagaaactcctgtatatattcaaacaaccatttatgaggccagtacaaactactcaagaggaagatggctgtagctgccgatttccagaagaagaagaaggaggatgtgaactgagagtgaagttcagcaggagcgcagacgcccccgcgtacaagcagggccagaaccagctctataacgagctcaatctaggacgaagagaggagtacgatgttttggacaagcgtagaggccgggaccctgagatggggggaaagccgagaaggaagaaccctcaggaaggcctgtacaatgaactgcagaaagataagatggcggaggcctacagtgagattgggatgaaaggcgagcgccggaggggcaaggggcacgatggcctttaccagggactcagtacagccaccaaggacacctacgacgcccttcacatgcaggccctgccccctcgc

SEQ ID NO: 381 - protein, 245 aa, Artificial Sequence
  CT-489 EGFR ScFv
QVQLQESGPGLVKPSQTLSLTCTVSGGSISSGDYYWSWIRQPPGKGLEWIGYIYYSGSTDYNPSLKSRVTMSVDTSKNQFSLKVNSVTAADTAVYYCARVSIFGVGTFDYWGQGTLVTVSSGGGGSGGGGSGGGGSGGEIVMTQSPATLSLSPGERATLSCRASQSVSSYLAWYQQKPGQAPRLLIYDASNRATGIPARFSGSGSGTDFTLTISSLEPEDFAVYYCHQYGSTPLTFGGGTKAEIK

SEQ ID NO: 382 - DNA, 360 bp, Artificial Sequence
  Beta-2 microglobulin (B2M)
atgtctcgctccgtggccttagctgtgctcgcgctactctctctttctggcctggaggctatccagcgtactccaaagattcaggtttactcacgtcatccagcagagaatggaaagtcaaatttcctgaattgctatgtgtctgggtttcatccatccgacattgaagttgacttactgaagaatggagagagaattgaaaaagtggagcattcagacttgtctttcagcaaggactggtctttctatctcttgtactacactgaattcacccccactgaaaaagatgagtatgcctgccgtgtgaaccatgtgactttgtcacagcccaagatagttaagtgggatcgagacatgtaa

SEQ ID NO: 383 - DNA, 186 bp, Artificial Sequence
  CD52
atgaagcgcttcctcttcctcctactcaccatcagcctcctggttatggtacagatacaaactggactctcaggacaaaacgacaccagccaaaccagcagcccctcagcatccagcaacataagcggaggcattttccttttcttcgtggccaatgccataatccacctcttctgcttcagttga

SEQ ID NO: 384 - DNA, 1508 bp, Artificial Sequence
  TCRalpha (TRAC)
ttttgaaacccttcaaaggcagagacttgtccagcctaacctgcctgctgctcctagctcctgaggctcagggcccttggcttctgtccgctctgctcagggccctccagcgtggccactgctcagccatgctcctgctgctcgtcccagtgctcgaggtgatttttaccctgggaggaaccagagcccagtcggtgacccagcttggcagccacgtctctgtctctgaaggagccctggttctgctgaggtgcaactactcatcgtctgttccaccatatctcttctggtatgtgcaataccccaaccaaggactccagcttctcctgaagtacacatcagcggccaccctggttaaaggcatcaacggttttgaggctgaatttaagaagagtgaaacctccttccacctgacgaaaccctcagcccatatgagcgacgcggctgagtacttctgtgctgtgagtgatctcgaaccgaacagcagtgcttccaagataatctttggatcagggaccagactcagcatccggccaaatatccagaaccctgaccctgccgtgtaccagctgagagactctaaatccagtgacaagtctgtctgcctattcaccgattttgattctcaaacaaatgtgtcacaaagtaaggattctgatgtgtatatcacagacaaaactgtgctagacatgaggtctatggacttcaagagcaacagtgctgtggcctggagcaacaaatctgactttgcatgtgcaaacgccttcaacaacagcattattccagaagacaccttcttccccagcccagaaagttcctgtgatgtcaagctggtcgagaaaagctttgaaacagatacgaacctaaactttcaaaacctgtcagtgattgggttccgaatcctcctcctgaaagtggccgggtttaatctgctcatgacgctgcggctgtggtccagctgagatctgcaagattgtaagacagcctgtgctccctcgctccttcctctgcattgcccctcttctccctctccaaacagagggaactctcctacccccaaggaggtgaaagctgctaccacctctgtgcccccccggtaatgccaccaactggatcctacccgaatttatgattaagattgctgaagagctgccaaacactgctgccaccccctctgttcccttattgctgcttgtcactgcctgacattcacggcagaggcaaggctgctgcagcctcccctggctgtgcacattccctcctgctccccagagactgcctccgccatcccacagatgatggatcttcagtgggttctcttgggctctaggtcctggagaatgttgtgaggggtttatttttttttaatagtgttcataaagaaatacatagtattcttcttctcaagacgtggggggaaattatctcattatcgaggccctgctatgctgtgtgtctgggcgtgttgtatgtcctgctgccgatgccttcattaaaatgatttggaa

SEQ ID NO: 385 - DNA, 462 bp, Artificial Sequence
  TCRbeta (TCRBV)
atgagcatcagcctcctgtgctgtgcagcctttcctctcctgtgggcaggtccagtgaatgctggtggtgtcactcagaccccaaaattccgcatcctgaagataggacagagcatgacactgcagtgtgcccaggatatgaaccataactacatgtactggtatcgacaagacccaggcatggggctgaagctgatttattattcagttggtgctggtatcactgacaaaggagaagtcccgaatggatacaacgtctccagatcaaccacagaggatttcccgctcaggctggagttggctgctccctcccagacatctgtgtacttctgtgccagcagtaggggtggggccgggctcaatgagcagttcttcgggccagggacacggctcaccgtgctagaggacctgaaaaaggtgttcccacccgaggtcgctgtgtttgagccatcagaagcttcc

SEQ ID NO: 386 - DNA, 2690 bp, Artificial Sequence
  CD3gamma (CD3G)
agtctagctgctgcacaggctggctggctggctggctgctaagggctgctccacgcttttgccggaggacagagactgacatggaacaggggaagggcctggctgtcctcatcctggctatcattcttcttcaaggtactttggcccagtcaatcaaaggaaaccacttggttaaggtgtatgactatcaagaagatggttcggtacttctgacttgtgatgcagaagccaaaaatatcacatggtttaaagatgggaagatgatcggcttcctaactgaagataaaaaaaaatggaatctgggaagtaatgccaaggaccctcgagggatgtatcagtgtaaaggatcacagaacaagtcaaaaccactccaagtgtattacagaatgtgtcagaactgcattgaactaaatgcagccaccatatctggctttctctttgctgaaatcgtcagcattttcgtccttgctgttggggtctacttcattgctggacaggatggagttcgccagtcgagagcttcagacaagcagactctgttgcccaatgaccagctctaccagcccctcaaggatcgagaagatgaccagtacagccaccttcaaggaaaccagttgaggaggaattgaactcaggactcagagtagtccaggtgttctcctcctattcagttcccagaatcaaagcaatgcattttggaaagctcctagcagagagactttcagccctaaatctagactcaaggttcccagagatgacaaatggagaagaaaggccatcagagcaaatttgggggtttctcaaataaaataaaaataaaaacaaatactgtgtttcagaagcgccacctattggggaaaattgtaaaagaaaaatgaaaagatcaaataaccccctggatttgaatataattttttgtgttgtaatttttatttcgtttttgtataggttataattcacatggctcaaatattcagtgaaagctctccctccaccgccatcccctgctacccagtgaccctgttgccctcttcagagacaaattagtttctcttttttttttttttttttttttttttgagacagtctggctctgtcacccaggctgaaatgcagtggcaccatctcggctcactgcaacctctgcctcctgggttcaagcgattctcctgcctcagcctcccgggcagctgggattacaggcacacactaccacacctggctaatttttgtatttttagtagagacagggttttgctctgttggccaagctggtctcgaactcctgacctcaagtgatccgcccgcctcagcctcccaaagtgctgggattacaggtgtgagccaccatgcctggtcttaaaaccagtttcttatatatctctctggaggtattctaggcatatatgagcacattctcaagtacatattatcctcccttcccctatcttttagacaaatgatatcaaactatacatcttgtgagattattgcataccattatatgaagataccattatatcctttttaatgcaaccatattgtacaaatagactatgatttatttaacctgttatctatcagtggatatttaagttggtagttggttccaatcttttgctcttacaacaattctgcaatgactaacattgtataaatatcatttttaaaaataattgcattgaagcataatgtacatgccataaaatccacccatcttaagtgatttcacctgttctcagaaatttttagtaaatttaactaattgtacagccattaccataatccagctttaggacattttcttttttttcttttcttttcttttttttcttttttttttttttttgaagtggaatcttgctctgtggcccaggctggagtgcagtggcgcgatctcagctcactgcaacctccacctcctgggttcaagcgattctcttgccttggcctcccgagtagctgagactacaggcacatgccaccacgcccagctcattttttgtgtatttagtatttgtgtatctagtatttgtgtacttagtagagacagggtttcaccatgttggccaggctggtctccaattcctgacctcaggcgatccacccgccttgacctcccaaagtgctgggattacaggtgtgagccaccgcgccaggcccgtaactgtattttaatatagccattctatggatttaatatggtattttattatggccttaatttgcatttccctagatactaaccatgctgagtgtcctgtcttgtgtttattaaccattcatatatttttagtgaaatgtgtatcaaatcttttgcccatttttaagttgacttatttgtttgtcttcttactattgggttgcatatgtttttgatataagtcctttatcagatatatgatttggaaatattttctaccaatctgtggtttgtttttcttaatggtgtcttttgaagtgcaaaaggtttgaattttgaagtacattttattgattttttcttctatatattgtgcttttggtatcatgtctaataaatctttaccaaacccacagttacaaagattttctcctgtcttctttttatactttttacagctttatggttttagctctaacaataaatgtgattttgaacatacataagactatttgtaacaaacacaaataaattgaattgttgggca

SEQ ID NO: 387 - DNA, 701 bp, Artificial Sequence
  CD3delta (CD3D)
ctttccggtacctgtgagtcagctaggggagggcagctctcacccaggctgatagttcggtgacctggctttatctactggatgagttccgctgggagatggaacatagcacgtttctctctggcctggtactggctacccttctctcgcaagtgagccccttcaagatacctatagaggaacttgaggacagagtgtttgtgaattgcaataccagcatcacatgggtagagggaacggtgggaacactgctctcagacattacaagactggacctgggaaaacgcatcctggacccacgaggaatatataggtgtaatgggacagatatatacaaggacaaagaatctaccgtgcaagttcattatcgaatgtgccagagctgtgtggagctggatccagccaccgtggctggcatcattgtcactgatgtcattgccactctgctccttgctttgggagtcttctgctttgctggacatgagactggaaggctgtctggggctgccgacacacaagctctgttgaggaatgaccaggtctatcagcccctccgagatcgagatgatgctcagtacagccaccttggaggaaactgggctcggaacaagtgaacctgagactggtggcttctagaagcagccattaccaactgtaccttcccttcttgctcagccaataaatatatcctctttcactca

SEQ ID NO: 388 - DNA, 1361 bp, Artificial Sequence
  CD3epsilon (CD3E)
agaaaccctcctcccctcccagcctcaggtgcctgcttcagaaaatgaagtagtaagtctgctggcctccgccatcttagtaaagtaacagtcccatgaaacaaagatgcagtcgggcactcactggagagttctgggcctctgcctcttatcagttggcgtttgggggcaagatggtaatgaagaaatgggtggtattacacagacaccatataaagtctccatctctggaaccacagtaatattgacatgccctcagtatcctggatctgaaatactatggcaacacaatgataaaaacataggcggtgatgaggatgataaaaacataggcagtgatgaggatcacctgtcactgaaggaattttcagaattggagcaaagtggttattatgtctgctaccccagaggaagcaaaccagaagatgcgaacttttatctctacctgagggcaagagtgtgtgagaactgcatggagatggatgtgatgtcggtggccacaattgtcatagtggacatctgcatcactgggggcttgctgctgctggtttactactggagcaagaatagaaaggccaaggccaagcctgtgacacgaggagcgggtgctggcggcaggcaaaggggacaaaacaaggagaggccaccacctgttcccaacccagactatgagcccatccggaaaggccagcgggacctgtattctggcctgaatcagagacgcatctgaccctctggagaacactgcctcccgctggcccaggtctcctctccagtccccctgcgactccctgtttcctgggctagtcttggaccccacgagagagaatcgttcctcagcctcatggtgaactcgcgccctccagcctgatcccccgctccctcctccctgccttctctgctggtacccagtcctaaaatattgctgcttcctcttcctttgaagcatcatcagtagtcacaccctcacagctggcctgccctcttgccaggatatttatttgtgctattcactcccttccctttggatgtaacttctccgttcagttccctccttttcttgcatgtaagttgtcccccatcccaaagtattccatctacttttctatcgccgtccccttttgcagccctctctggggatggactgggtaaatgttgacagaggccctgccccgttcacagatcctggccctgagccagccctgtgctcctccctcccccaacactccctaccaaccccctaatcccctactccctccaccccccctccactgtaggccactggatggtcatttgcatctccgtaaatgtgctctgctcctcagctgagagagaaaaaaataaactgtatttggctgcaa

SEQ ID NO: 389 - DNA, 1597 bp, Artificial Sequence
  CD3zeta (CD247, transcript variant 2)
aaccgtcccggccaccgctgcctcagcctctgcctcccagcctctttctgagggaaaggacaagatgaagtggaaggcgcttttcaccgcggccatcctgcaggcacagttgccgattacagaggcacagagctttggcctgctggatcccaaactctgctacctgctggatggaatcctcttcatctatggtgtcattctcactgccttgttcctgagagtgaagttcagcaggagcgcagacgcccccgcgtaccagcagggccagaaccagctctataacgagctcaatctaggacgaagagaggagtacgatgttttggacaagagacgtggccgggaccctgagatggggggaaagccgagaaggaagaaccctcaggaaggcctgtacaatgaactgcagaaagataagatggcggaggcctacagtgagattgggatgaaaggcgagcgccggaggggcaaggggcacgatggcctttaccagggtctcagtacagccaccaaggacacctacgacgcccttcacatgcaggccctgccccctcgctaacagccaggggatttcaccactcaaaggccagacctgcagacgcccagattatgagacacaggatgaagcatttacaacccggttcactcttctcagccactgaagtattcccctttatgtacaggatgctttggttatatttagctccaaaccttcacacacagactgttgtccctgcactctttaagggagtgtactcccagggcttacggccctggccttgggccctctggtttgccggtggtgcaggtagacctgtctcctggcggttcctcgttctccctgggaggcgggcgcactgcctctcacagctgagttgttgagtctgttttgtaaagtccccagagaaagcgcagatgctagcacatgccctaatgtctgtatcactctgtgtctgagtggcttcactcctgctgtaaatttggcttctgttgtcaccttcacctcctttcaaggtaactgtactgggccatgttgtgcctccctggtgagagggccgggcagaggggcagatggaaaggagcctaggccaggtgcaaccagggagctgcaggggcatgggaaggtgggcgggcaggggagggtcagccagggcctgcgagggcagcgggagcctccctgcctcaggcctctgtgccgcaccattgaactgtaccatgtgctacaggggccagaagatgaacagactgaccttgatgagctgtgcacaaagtggcataaaaaacatgtggttacacagtgtgaataaagtgctgcggagcaagaggaggccgttgattcacttcacgctttcagcgaatgacaaaatcatctttgtgaaggcctcgcaggaagacccaacacatgggacctataactgcccagcggacagtggcaggacaggaaaaacccgtcaatgtactaggatactgctgcgtcattacagggcacaggccatggatggaaaacgctctctactctgctttttttctactgttttaatttatactggcatgctaaagccttcctattttgcataataaatgcttcagtgaaaatgca

SEQ ID NO: 390 - DNA, 23 bp, Artificial Sequence
  HLA-A targeting gRNA
tggacgacacgcagttcgtgcgg

SEQ ID NO: 391 - DNA, 23 bp, Artificial Sequence
  HLA-A targeting gRNA
cagatacctggagaacgggaagg

SEQ ID NO: 392 - DNA, 23 bp, Artificial Sequence
  HLA-A targeting gRNA
tcccgttctccaggtatctgcgg

SEQ ID NO: 393 - DNA, 23 bp, Artificial Sequence
  HLA-A targeting gRNA
ccgccgcggtccaagagcgcagg

SEQ ID NO: 394 - DNA, 23 bp, Artificial Sequence
  HLA-A targeting gRNA
cctgcgctcttggaccgcggcgg

SEQ ID NO: 395 - DNA, 23 bp, Artificial Sequence
  HLA-A targeting gRNA
ggacctgcgctcttggaccgcgg

SEQ ID NO: 396 - DNA, 23 bp, Artificial Sequence
  HLA-A targeting gRNA
aaggagacgctgcagcgcacggg

SEQ ID NO: 397 - DNA, 23 bp, Artificial Sequence
  HLA-A targeting gRNA
gaaggagacgctgcagcgcacgg

SEQ ID NO: 398 - DNA, 23 bp, Artificial Sequence
  HLA-A targeting gRNA
gcgggcgccgtggatagagcagg

SEQ ID NO: 399 - DNA, 23 bp, Artificial Sequence
  HLA-A targeting gRNA
tgctctatccacggcgcccgcgg

SEQ ID NO: 400 - DNA, 23 bp, Artificial Sequence
  HLA-A targeting gRNA
cgatgaagcggggctccccgcgg

SEQ ID NO: 401 - DNA, 23 bp, Artificial Sequence
  HLA-A targeting gRNA
cgtgtcccggcccggccgcgggg

SEQ ID NO: 402 - DNA, 23 bp, Artificial Sequence
  HLA-A targeting gRNA
cggctccatcctctggctcgcgg

SEQ ID NO: 403 - DNA, 23 bp, Artificial Sequence
  HLA-A targeting gRNA
gatgtaatccttgccgtcgtagg

SEQ ID NO: 404 - DNA, 23 bp, Artificial Sequence
  HLA-A targeting gRNA
acagcgacgccgcgagccagagg

SEQ ID NO: 405 - DNA, 23 bp, Artificial Sequence
  HLA-A targeting gRNA
ggatggagccgcgggcgccgtgg

SEQ ID NO: 406 - DNA, 23 bp, Artificial Sequence
  HLA-A targeting gRNA
ggcgccgtggatagagcaggagg

SEQ ID NO: 407 - DNA, 23 bp, Artificial Sequence
  HLA-A targeting gRNA
gcgccgtggatagagcaggaggg

SEQ ID NO: 408 - DNA, 23 bp, Artificial Sequence
  HLA-A targeting gRNA
cggctactacaaccagagcgagg

SEQ ID NO: 409 - DNA, 23 bp, Artificial Sequence
  HLA-A targeting gRNA
ctggttgtagtagccgcgcaggg

SEQ ID NO: 410 - DNA, 23 bp, Artificial Sequence
  HLA-A targeting gRNA
tactacaaccagagcgaggccgg

SEQ ID NO: 411 - DNA, 23 bp, Artificial Sequence
  HLA-A targeting gRNA
ctacctggagggcacgtgcgtgg

SEQ ID NO: 412 - DNA, 23 bp, Artificial Sequence
  HLA-A targeting gRNA
cacgcacgtgccctccaggtagg

SEQ ID NO: 413 - DNA, 23 bp, Artificial Sequence
  HLA-A targeting gRNA
gcagggtccccaggtccactcgg

SEQ ID NO: 414 - DNA, 23 bp, Artificial Sequence
  HLA-A targeting gRNA
gtggacctggggaccctgcgcgg

SEQ ID NO: 415 - DNA, 23 bp, Artificial Sequence
  HLA-A targeting gRNA
tggagggcacgtgcgtggagtgg

SEQ ID NO: 416 - DNA, 23 bp, Artificial Sequence
  HLA-A targeting gRNA
gtatggctgcgacgtggggtcgg

SEQ ID NO: 417 - DNA, 23 bp, Artificial Sequence
  HLA-A targeting gRNA
ctgagctgccatgtccgccgcgg

SEQ ID NO: 418 - DNA, 23 bp, Artificial Sequence
  HLA-A targeting gRNA
ggattacatcgccctgaaagagg

SEQ ID NO: 419 - DNA, 23 bp, Artificial Sequence
  HLA-A targeting gRNA
caagtgggaggcggcccatgtgg

SEQ ID NO: 420 - DNA, 23 bp, Artificial Sequence
  HLA-A targeting gRNA
gtgggaggcggcccatgtggcgg

SEQ ID NO: 421 - DNA, 23 bp, Artificial Sequence
  HLA-A targeting gRNA
cagttgagagcctacctggaggg

SEQ ID NO: 422 - DNA, 23 bp, Artificial Sequence
  HLA-A targeting gRNA
gcagttgagagcctacctggagg

SEQ ID NO: 423 - DNA, 23 bp, Artificial Sequence
  HLA-A targeting gRNA
taccaccagtacgcctacgacgg

SEQ ID NO: 424 - DNA, 23 bp, Artificial Sequence
  HLA-A targeting gRNA
tgccgtcgtaggcgtactggtgg

SEQ ID NO: 425 - DNA, 23 bp, Artificial Sequence
  HLA-A targeting gRNA
ccagtacgcctacgacggcaagg

SEQ ID NO: 426 - DNA, 23 bp, Artificial Sequence
  HLA-A targeting gRNA
ggatgtgaagaaatacctcatgg

SEQ ID NO: 427 - DNA, 23 bp, Artificial Sequence
  HLA-A targeting gRNA
atttcttcacatccgtgtcccgg

SEQ ID NO: 428 - DNA, 23 bp, Artificial Sequence
  HLA-A targeting gRNA
aggcgtactggtggtacccgcgg

SEQ ID NO: 429 - DNA, 23 bp, Artificial Sequence
  HLA-A targeting gRNA
cgtactggtggtacccgcggagg

SEQ ID NO: 430 - DNA, 23 bp, Artificial Sequence
  HLA-A targeting gRNA
gaggatgtatggctgcgacgtgg

SEQ ID NO: 431 - DNA, 23 bp, Artificial Sequence
  HLA-A targeting gRNA
ggatgtatggctgcgacgtgggg

SEQ ID NO: 432 - DNA, 23 bp, Artificial Sequence
  HLA-A targeting gRNA
ctcagaccaccaagcacaagtgg

SEQ ID NO: 433 - DNA, 23 bp, Artificial Sequence
  HLA-A targeting gRNA
tcagaccaccaagcacaagtggg

SEQ ID NO: 434 - DNA, 23 bp, Artificial Sequence
  HLA-A targeting gRNA
caccaagcacaagtgggaggcgg

SEQ ID NO: 435 - DNA, 23 bp, Artificial Sequence
  HLA-A targeting gRNA
gaccaccaagcacaagtgggagg

SEQ ID NO: 436 - DNA, 23 bp, Artificial Sequence
  HLA-A targeting gRNA
gagccccgcttcatcgcagtggg

SEQ ID NO: 437 - DNA, 23 bp, Artificial Sequence
  HLA-A targeting gRNA
gtagcccactgcgatgaagcggg

SEQ ID NO: 438 - DNA, 23 bp, Artificial Sequence
  HLA-A targeting gRNA
tagcccactgcgatgaagcgggg

SEQ ID NO: 439 - DNA, 23 bp, Artificial Sequence
  HLA-A targeting gRNA
cgtagcccactgcgatgaagcgg

SEQ ID NO: 440 - DNA, 23 bp, Artificial Sequence
  HLA-A targeting gRNA
cttcatcgcagtgggctacgtgg

SEQ ID NO: 441 - DNA, 23 bp, Artificial Sequence
  HLA-A targeting gRNA
ggagccccgcttcatcgcagtgg

SEQ ID NO: 442 - DNA, 23 bp, Artificial Sequence
  HLA-A targeting gRNA
cggggagacacggaaagtgaagg

SEQ ID NO: 443 - DNA, 23 bp, Artificial Sequence
  HLA-A targeting gRNA
agtattgggacggggagacacgg

SEQ ID NO: 444 - DNA, 23 bp, Artificial Sequence
  HLA-A targeting gRNA
agggtccggagtattgggacggg

SEQ ID NO: 445 - DNA, 23 bp, Artificial Sequence
  HLA-A targeting gRNA
gagggtccggagtattgggacgg

SEQ ID NO: 446 - DNA, 23 bp, Artificial Sequence
  HLA-A targeting gRNA
ggaccctcctgctctatccacgg

SEQ ID NO: 447 - DNA, 23 bp, Artificial Sequence
  HLA-A targeting gRNA
gtggatagagcaggagggtccgg

SEQ ID NO: 448 - DNA, 23 bp, Artificial Sequence
  HLA-A targeting gRNA
agactcaccgagtggacctgggg

SEQ ID NO: 449 - DNA, 23 bp, Artificial Sequence
  HLA-A targeting gRNA
cactcggtgagtctgtgagtggg

SEQ ID NO: 450 - DNA, 23 bp, Artificial Sequence
  HLA-A targeting gRNA
cagactcaccgagtggacctggg

SEQ ID NO: 451 - DNA, 23 bp, Artificial Sequence
  HLA-A targeting gRNA
ccactcacagactcaccgagtgg

SEQ ID NO: 452 - DNA, 23 bp, Artificial Sequence
  HLA-A targeting gRNA
ccactcggtgagtctgtgagtgg

SEQ ID NO: 453 - DNA, 23 bp, Artificial Sequence
  HLA-A targeting gRNA
tcggactggcgcttcctccgcgg

SEQ ID NO: 454 - DNA, 23 bp, Artificial Sequence
  HLA-A targeting gRNA
gcagccatacatcctctggacgg

SEQ ID NO: 455 - DNA, 23 bp, Artificial Sequence
  HLA-A targeting gRNA
tctcaactgctccgccacatggg

SEQ ID NO: 456 - DNA, 23 bp, Artificial Sequence
  HLA-A targeting gRNA
accctcatgctgcacatggcagg

SEQ ID NO: 457 - DNA, 23 bp, Artificial Sequence
  HLA-A targeting gRNA
acctgccatgtgcagcatgaggg

SEQ ID NO: 458 - DNA, 23 bp, Artificial Sequence
  HLA-A targeting gRNA
cacctgccatgtgcagcatgagg

SEQ ID NO: 459 - DNA, 23 bp, Artificial Sequence
  HLA-A targeting gRNA
ggaggaccagacccaggacacgg

SEQ ID NO: 460 - DNA, 23 bp, Artificial Sequence
  HLA-A targeting gRNA
ggatggggaggaccagacccagg

SEQ ID NO: 461 - DNA, 23 bp, Artificial Sequence
  HLA-A targeting gRNA
gacctggcagcgggatggggagg

SEQ ID NO: 462 - DNA, 23 bp, Artificial Sequence
  HLA-A targeting gRNA
agatcacactgacctggcagcgg

SEQ ID NO: 463 - DNA, 23 bp, Artificial Sequence
  HLA-A targeting gRNA
gatcacactgacctggcagcggg

SEQ ID NO: 464 - DNA, 23 bp, Artificial Sequence
  HLA-A targeting gRNA
aggtcagtgtgatctccgcaggg

SEQ ID NO: 465 - DNA, 23 bp, Artificial Sequence
  HLA-A targeting gRNA
aagcccctcaccctgagatgggg

SEQ ID NO: 466 - DNA, 23 bp, Artificial Sequence
  HLA-A targeting gRNA
ctgcggagatcacactgacctgg

SEQ ID NO: 467 - DNA, 23 bp, Artificial Sequence
  HLA-A targeting gRNA
cagcaatgatgcccacgatgggg

SEQ ID NO: 468 - DNA, 23 bp, Artificial Sequence
  HLA-A targeting gRNA
ccagcaatgatgcccacgatggg

SEQ ID NO: 469 - DNA, 23 bp, Artificial Sequence
  HLA-A targeting gRNA
gccagcaatgatgcccacgatgg

SEQ ID NO: 470 - DNA, 23 bp, Artificial Sequence
  HLA-A targeting gRNA
ggatggaaccttccagaagtggg

SEQ ID NO: 471 - DNA, 23 bp, Artificial Sequence
  HLA-A targeting gRNA
gggatggaaccttccagaagtgg

SEQ ID NO: 472 - DNA, 23 bp, Artificial Sequence
  HLA-A targeting gRNA
atgcccacgatggggatggtggg

SEQ ID NO: 473 - DNA, 23 bp, Artificial Sequence
  HLA-A targeting gRNA
cagcccaccatccccatcgtggg

SEQ ID NO: 474 - DNA, 23 bp, Artificial Sequence
  HLA-A targeting gRNA
ccagcccaccatccccatcgtgg

SEQ ID NO: 475 - DNA, 23 bp, Artificial Sequence
  HLA-A targeting gRNA
gatgcccacgatggggatggtgg

SEQ ID NO: 476 - DNA, 23 bp, Artificial Sequence
  HLA-A targeting gRNA
cagggcccagcacctcagggtgg

SEQ ID NO: 477 - DNA, 23 bp, Artificial Sequence
  HLA-A targeting gRNA
aatgatgcccacgatggggatgg

SEQ ID NO: 478 - DNA, 23 bp, Artificial Sequence
  HLA-A targeting gRNA
ggccctgacccagacctgggcgg

SEQ ID NO: 479 - DNA, 23 bp, Artificial Sequence
  HLA-A targeting gRNA
gacccaggacacggagctcgtgg

SEQ ID NO: 480 - DNA, 23 bp, Artificial Sequence
  HLA-A targeting gRNA
acacggagctcgtggagaccagg

SEQ ID NO: 481 - DNA, 23 bp, Artificial Sequence
  HLA-A targeting gRNA
cgtggagaccaggcctgcagggg

SEQ ID NO: 482 - DNA, 23 bp, Artificial Sequence
  HLA-A targeting gRNA
tcgtggagaccaggcctgcaggg

SEQ ID NO: 483 - DNA, 23 bp, Artificial Sequence
  HLA-A targeting gRNA
agctgtgatcactggagctgtgg

SEQ ID NO: 484 - DNA, 23 bp, Artificial Sequence
  HLA-A targeting gRNA
aaaaggagggagctactctcagg

SEQ ID NO: 485 - DNA, 23 bp, Artificial Sequence
  HLA-A targeting gRNA
atgtggaggaggaagagctcagg

SEQ ID NO: 486 - DNA, 23 bp, Artificial Sequence
  HLA-A targeting gRNA
gtgtctctcacagcttgtaaagg

SEQ ID NO: 487 - DNA, 23 bp, Artificial Sequence
  HLA-A targeting gRNA
gagagacacatcagagccctggg

SEQ ID NO: 488 - DNA, 23 bp, Artificial Sequence
  HLA-A targeting gRNA
ctccgcagggtagaagctcaggg

SEQ ID NO: 489 - DNA, 23 bp, Artificial Sequence
  HLA-A targeting gRNA
ggccctgagcttctaccctgcgg

SEQ ID NO: 490 - DNA, 23 bp, Artificial Sequence
  HLA-A targeting gRNA
gctcagggcccagcacctcaggg

SEQ ID NO: 491 - DNA, 23 bp, Artificial Sequence
  HLA-A targeting gRNA
tatctctgctcctgtccagaagg

SEQ ID NO: 492 - DNA, 23 bp, Artificial Sequence
  HLA-A targeting gRNA
agtagcaggacgagggttcgggg

SEQ ID NO: 493 - DNA, 23 bp, Artificial Sequence
  HLA-A targeting gRNA
ccccgagagtagcaggacgaggg

SEQ ID NO: 494 - DNA, 23 bp, Artificial Sequence
  HLA-A targeting gRNA
ccctcgtcctgctactctcgggg

SEQ ID NO: 495 - DNA, 23 bp, Artificial Sequence
  HLA-A targeting gRNA
cctcgtcctgctactctcggggg

SEQ ID NO: 496 - DNA, 23 bp, Artificial Sequence
  HLA-A targeting gRNA
ctgtggtcgctgctgtgatgtgg

SEQ ID NO: 497 - DNA, 23 bp, Artificial Sequence
  HLA-A targeting gRNA
tcgctgctgtgatgtggaggagg

SEQ ID NO: 498 - DNA, 23 bp, Artificial Sequence
  HLA-A targeting gRNA
tggtcgctgctgtgatgtggagg

SEQ ID NO: 499 - DNA, 23 bp, Artificial Sequence
  HLA-A targeting gRNA
cacagccgcccacttctggaagg

SEQ ID NO: 500 - DNA, 23 bp, Artificial Sequence
  HLA-A targeting gRNA
ccagaagtgggcggctgtggtgg

SEQ ID NO: 501 - DNA, 23 bp, Artificial Sequence
  HLA-A targeting gRNA
tggaaccttccagaagtgggcgg

SEQ ID NO: 502 - DNA, 23 bp, Artificial Sequence
  HLA-A targeting gRNA
tcacagctccaaagagaaccagg

SEQ ID NO: 503 - DNA, 23 bp, Artificial Sequence
  HLA-A targeting gRNA
ctgaccatgaagccaccctgagg

SEQ ID NO: 504 - DNA, 23 bp, Artificial Sequence
  HLA-A targeting gRNA
gcaaaccctcatgctgcacatgg

SEQ ID NO: 505 - DNA, 23 bp, Artificial Sequence
  HLA-A targeting gRNA
tgaagccaccctgaggtgctggg

SEQ ID NO: 506 - DNA, 23 bp, Artificial Sequence
  HLA-A targeting gRNA
ggtgagtcatatgcgttttgggg

SEQ ID NO: 507 - DNA, 23 bp, Artificial Sequence
  HLA-A targeting gRNA
gtgagtcatatgcgttttggggg

SEQ ID NO: 508 - DNA, 23 bp, Artificial Sequence
  HLA-A targeting gRNA
cttcatggtcagagacagcgtgg

SEQ ID NO: 509 - DNA, 23 bp, Artificial Sequence
  HLA-A targeting gRNA
tctggccctgacccagacctggg

SEQ ID NO: 510 - DNA, 23 bp, Artificial Sequence
  HLA-A targeting gRNA
caggctgcaagtaagtatgaagg

SEQ ID NO: 511 - DNA, 23 bp, Artificial Sequence
  HLA-A targeting gRNA
cagtcacaagtcacaggggaagg

SEQ ID NO: 512 - DNA, 23 bp, Artificial Sequence
  HLA-A targeting gRNA
ccagcagtcacaagtcacagggg

SEQ ID NO: 513 - DNA, 23 bp, Artificial Sequence
  HLA-A targeting gRNA
cccctgtgacttgtgactgctgg

SEQ ID NO: 514 - DNA, 23 bp, Artificial Sequence
  HLA-A targeting gRNA
ctttacaaaagagtaagtgctgg

SEQ ID NO: 515 - DNA, 23 bp, Artificial Sequence
  HLA-A targeting gRNA
gagatttcttgtctcactgaggg

SEQ ID NO: 516 - DNA, 23 bp, Artificial Sequence
  HLA-A targeting gRNA
gaggttcctctaggaccttaagg

SEQ ID NO: 517 - DNA, 23 bp, Artificial Sequence
  HLA-A targeting gRNA
gctgcaagtaagtatgaaggagg

SEQ ID NO: 518 - DNA, 23 bp, Artificial Sequence
  HLA-A targeting gRNA
tgagatttcttgtctcactgagg

SEQ ID NO: 519 - DNA, 23 bp, Artificial Sequence
  HLA-A targeting gRNA
gcctaaactgaaaatgaaaccgg

SEQ ID NO: 520 - DNA, 23 bp, Artificial Sequence
  HLA-A targeting gRNA
tctggtcctgacctgagtggagg

SEQ ID NO: 521 - DNA, 23 bp, Artificial Sequence
  HLA-A targeting gRNA
aagagtaagtgctggcacacagg

SEQ ID NO: 522 - DNA, 23 bp, Artificial Sequence
  HLA-A targeting gRNA
agagtaagtgctggcacacaggg

SEQ ID NO: 523 - DNA, 23 bp, Artificial Sequence
  HLA-A targeting gRNA
ccaggcagtgacagtgcccaggg

SEQ ID NO: 524 - DNA, 23 bp, Artificial Sequence
  HLA-A targeting gRNA
cccaggcagtgacagtgcccagg

SEQ ID NO: 525 - DNA, 23 bp, Artificial Sequence
  HLA-A targeting gRNA
ccctgggcactgtcactgcctgg

SEQ ID NO: 526 - DNA, 23 bp, Artificial Sequence
  HLA-A targeting gRNA
cctgggcactgtcactgcctggg

SEQ ID NO: 527 - DNA, 23 bp, Artificial Sequence
  HLA-A targeting gRNA
ctgggcactgtcactgcctgggg

SEQ ID NO: 528 - DNA, 23 bp, Artificial Sequence
  HLA-A targeting gRNA
caattgtctcccctccttgtggg

SEQ ID NO: 529 - DNA, 23 bp, Artificial Sequence
  HLA-A targeting gRNA
cacaaggaggggagacaattggg

SEQ ID NO: 530 - DNA, 23 bp, Artificial Sequence
  HLA-A targeting gRNA
caggaggattcctctccctcagg

SEQ ID NO: 531 - DNA, 23 bp, Artificial Sequence
  HLA-A targeting gRNA
ccaattgtctcccctccttgtgg

SEQ ID NO: 532 - DNA, 23 bp, Artificial Sequence
  HLA-A targeting gRNA
ccacaaggaggggagacaattgg

SEQ ID NO: 533 - DNA, 23 bp, Artificial Sequence
  HLA-A targeting gRNA
cgggctggcctcccacaaggagg

SEQ ID NO: 534 - DNA, 23 bp, Artificial Sequence
  HLA-A targeting gRNA
ctccttgtgggaggccagcccgg

SEQ ID NO: 535 - DNA, 23 bp, Artificial Sequence
  HLA-A targeting gRNA
ctgagggagaggaatcctcctgg

SEQ ID NO: 536 - DNA, 23 bp, Artificial Sequence
  HLA-A targeting gRNA
ggaacctcagagtcactctctgg

SEQ ID NO: 537 - DNA, 23 bp, Artificial Sequence
  HLA-A targeting gRNA
ggctggcctcccacaaggagggg

SEQ ID NO: 538 - DNA, 23 bp, Artificial Sequence
  HLA-A targeting gRNA
gggctggcctcccacaaggaggg

SEQ ID NO: 539 - DNA, 23 bp, Artificial Sequence
  HLA-A targeting gRNA
tcccgggctggcctcccacaagg

SEQ ID NO: 540 - DNA, 23 bp, Artificial Sequence
  HLA-A targeting gRNA
tccttgtgggaggccagcccggg

SEQ ID NO: 541 - DNA, 23 bp, Artificial Sequence
  HLA-A targeting gRNA
tgagggagaggaatcctcctggg

SEQ ID NO: 542 - DNA, 23 bp, Artificial Sequence
  HLA-A targeting gRNA
tgtaccagagagtgactctgagg

SEQ ID NO: 543 - DNA, 23 bp, Artificial Sequence
  HLA-A targeting gRNA
ttgtctcccctccttgtgggagg

SEQ ID NO: 544 - DNA, 23 bp, Artificial Sequence
  HLA-A targeting gRNA
aggcctgagaggaaaagtcacgg

SEQ ID NO: 545 - DNA, 23 bp, Artificial Sequence
  HLA-A targeting gRNA
cagcctggacacaggcacctggg

SEQ ID NO: 546 - DNA, 23 bp, Artificial Sequence
  HLA-A targeting gRNA
ccagcctggacacaggcacctgg

SEQ ID NO: 547 - DNA, 23 bp, Artificial Sequence
  HLA-A targeting gRNA
ccaggtgcctgtgtccaggctgg

SEQ ID NO: 548 - DNA, 23 bp, Artificial Sequence
  HLA-A targeting gRNA
tatcccaggtgcctgtgtccagg

SEQ ID NO: 549 - DNA, 23 bp, Artificial Sequence
  HLA-A targeting gRNA
acttctggtcctgacctgagtgg

SEQ ID NO: 550 - DNA, 23 bp, Artificial Sequence
  HLA-A targeting gRNA
aaggcgcctgggcctctcccggg

SEQ ID NO: 551 - DNA, 23 bp, Artificial Sequence
  HLA-A targeting gRNA
atctcggacccggagactgtggg

SEQ ID NO: 552 - DNA, 23 bp, Artificial Sequence
  HLA-A targeting gRNA
gatctcggacccggagactgtgg

SEQ ID NO: 553 - DNA, 23 bp, Artificial Sequence
  HLA-A targeting gRNA
ggaaaagaggggaaggtgagggg

SEQ ID NO: 554 - DNA, 23 bp, Artificial Sequence
  HLA-A targeting gRNA
gggaaaagaggggaaggtgaggg

SEQ ID NO: 555 - DNA, 23 bp, Artificial Sequence
  HLA-A targeting gRNA
tgggaaaagaggggaaggtgagg

SEQ ID NO: 556 - DNA, 23 bp, Artificial Sequence
  HLA-A targeting gRNA
ctccctccttaccccatctcagg

SEQ ID NO: 557 - DNA, 23 bp, Artificial Sequence
  HLA-A targeting gRNA
tccctccttaccccatctcaggg

SEQ ID NO: 558 - DNA, 23 bp, Artificial Sequence
  HLA-A targeting gRNA
agcagagaacaaggcctgagagg

SEQ ID NO: 559 - DNA, 23 bp, Artificial Sequence
  HLA-A targeting gRNA
aggggccctgaccctgctaaagg

SEQ ID NO: 560 - DNA, 23 bp, Artificial Sequence
  HLA-A targeting gRNA
cttcacactcaatgtgtgtgggg

SEQ ID NO: 561 - DNA, 23 bp, Artificial Sequence
  HLA-A targeting gRNA
gcttcacactcaatgtgtgtggg

SEQ ID NO: 562 - DNA, 23 bp, Artificial Sequence
  HLA-A targeting gRNA
tgagtgtgaagcagagaacaagg

SEQ ID NO: 563 - DNA, 23 bp, Artificial Sequence
  HLA-A targeting gRNA
tgcttcacactcaatgtgtgtgg

SEQ ID NO: 564 - DNA, 23 bp, Artificial Sequence
  HLA-A targeting gRNA
ttcacactcaatgtgtgtggggg

SEQ ID NO: 565 - DNA, 23 bp, Artificial Sequence
  HLA-A targeting gRNA
ctgtgtccaggctggtgtctggg

SEQ ID NO: 566 - DNA, 23 bp, Artificial Sequence
  HLA-A targeting gRNA
ggatgtattgagcatgcgatggg

SEQ ID NO: 567 - DNA, 23 bp, Artificial Sequence
  HLA-A targeting gRNA
tggatgtattgagcatgcgatgg

SEQ ID NO: 568 - DNA, 23 bp, Artificial Sequence
  HLA-A targeting gRNA
gtcctccccatcccgctgccagg

SEQ ID NO: 569 - DNA, 23 bp, Artificial Sequence
  HLA-A targeting gRNA
cccggtttcattttcagtttagg

SEQ ID NO: 570 - DNA, 23 bp, Artificial Sequence
  HLA-A targeting gRNA
cctaaactgaaaatgaaaccggg

SEQ ID NO: 571 - DNA, 23 bp, Artificial Sequence
  HLA-A targeting gRNA
acagaacccagacaccagcctgg

SEQ ID NO: 572 - DNA, 23 bp, Artificial Sequence
  HLA-A targeting gRNA
accctgagatggggtaaggaggg

SEQ ID NO: 573 - DNA, 23 bp, Artificial Sequence
  HLA-A targeting gRNA
caccctgagatggggtaaggagg

SEQ ID NO: 574 - DNA, 23 bp, Artificial Sequence
  HLA-A targeting gRNA
cctcaccctgagatggggtaagg

SEQ ID NO: 575 - DNA, 23 bp, Artificial Sequence
  HLA-A targeting gRNA
ccttaccccatctcagggtgagg

SEQ ID NO: 576 - DNA, 23 bp, Artificial Sequence
  HLA-A targeting gRNA
cttaccccatctcagggtgaggg

SEQ ID NO: 577 - DNA, 23 bp, Artificial Sequence
  HLA-A targeting gRNA
ttaccccatctcagggtgagggg

SEQ ID NO: 578 - DNA, 23 bp, Artificial Sequence
  HLA-A targeting gRNA
aaatgtgtgactgcagacccagg

SEQ ID NO: 579 - DNA, 23 bp, Artificial Sequence
  HLA-A targeting gRNA
ggtctgcagtcacacatttctgg

SEQ ID NO: 580 - DNA, 23 bp, Artificial Sequence
  HLA-A targeting gRNA
ctccctcaggaccagagggaggg

SEQ ID NO: 581 - DNA, 23 bp, Artificial Sequence
  HLA-A targeting gRNA
tcactctctggtacaggatctgg

SEQ ID NO: 582 - DNA, 23 bp, Artificial Sequence
  HLA-A targeting gRNA
tcagagtcactctctggtacagg

SEQ ID NO: 583 - DNA, 23 bp, Artificial Sequence
  HLA-A targeting gRNA
tccctctggtcctgagggagagg

SEQ ID NO: 584 - DNA, 23 bp, Artificial Sequence
  HLA-A targeting gRNA
tcctctccctcaggaccagaggg

SEQ ID NO: 585 - DNA, 23 bp, Artificial Sequence
  HLA-A targeting gRNA
tctccctcaggaccagagggagg

SEQ ID NO: 586 - DNA, 23 bp, Artificial Sequence
  HLA-A targeting gRNA
ttcctctccctcaggaccagagg

SEQ ID NO: 587 - DNA, 23 bp, Artificial Sequence
  HLA-A targeting gRNA
caagcccctcaccctgagatggg

SEQ ID NO: 588 - DNA, 23 bp, Artificial Sequence
  HLA-A targeting gRNA
catctcagggtgaggggcttggg

SEQ ID NO: 589 - DNA, 23 bp, Artificial Sequence
  HLA-A targeting gRNA
ccaagcccctcaccctgagatgg

SEQ ID NO: 590 - DNA, 23 bp, Artificial Sequence
  HLA-A targeting gRNA
ccatctcagggtgaggggcttgg

SEQ ID NO: 591 - DNA, 23 bp, Artificial Sequence
  HLA-A targeting gRNA
ccagacaccagcctggacacagg

SEQ ID NO: 592 - DNA, 23 bp, Artificial Sequence
  HLA-A targeting gRNA
cctgtgtccaggctggtgtctgg

SEQ ID NO: 593 - DNA, 23 bp, Artificial Sequence
  HLA-A targeting gRNA
ctccgcagatacctggagaacgg

SEQ ID NO: 594 - DNA, 23 bp, Artificial Sequence
  HLA-A targeting gRNA
tgtcctgtgagataccagaaagg

SEQ ID NO: 595 - DNA, 23 bp, Artificial Sequence
  HLA-A targeting gRNA
aatgtgtgactgcagacccaggg

SEQ ID NO: 596 - DNA, 23 bp, Artificial Sequence
  HLA-A targeting gRNA
gagaccaggcctgcaggggatgg

SEQ ID NO: 597 - DNA, 23 bp, Artificial Sequence
  HLA-A targeting gRNA
actgacctggcagcgggatgggg

SEQ ID NO: 598 - DNA, 23 bp, Artificial Sequence
  HLA-A targeting gRNA
cactgacctggcagcgggatggg

SEQ ID NO: 599 - DNA, 23 bp, Artificial Sequence
  HLA-A targeting gRNA
acactgacctggcagcgggatgg

SEQ ID NO: 600 - DNA, 23 bp, Artificial Sequence
  HLA-A targeting gRNA
gagggttcggggcgccatgacgg

SEQ ID NO: 601 - DNA, 23 bp, Artificial Sequence
  HLA-A targeting gRNA
gcgtctccttcccgttctccagg

SEQ ID NO: 602 - DNA, 23 bp, Artificial Sequence
  HLA-A targeting gRNA
tccgcagatacctggagaacggg

SEQ ID NO: 603 - DNA, 23 bp, Artificial Sequence
  HLA-A targeting gRNA
caggtcagtgtgatctccgcagg

SEQ ID NO: 604 - DNA, 23 bp, Artificial Sequence
  HLA-A targeting gRNA
ctcttggaccgcggcggacatgg

SEQ ID NO: 605 - DNA, 23 bp, Artificial Sequence
  HLA-A targeting gRNA
cccatcgtgggcatcattgctgg

SEQ ID NO: 606 - DNA, 23 bp, Artificial Sequence
  HLA-A targeting gRNA
gctgcagcgcacgggtaccaggg

SEQ ID NO: 607 - DNA, 23 bp, Artificial Sequence
  HLA-A targeting gRNA
cacgggtaccaggggccacgggg

SEQ ID NO: 608 - DNA, 23 bp, Artificial Sequence
  HLA-A targeting gRNA
cgcacgggtaccaggggccacgg

SEQ ID NO: 609 - DNA, 23 bp, Artificial Sequence
  HLA-A targeting gRNA
ctgcagcgcacgggtaccagggg

SEQ ID NO: 610 - DNA, 23 bp, Artificial Sequence
  HLA-A targeting gRNA
gcacgggtaccaggggccacggg

SEQ ID NO: 611 - DNA, 23 bp, Artificial Sequence
  HLA-A targeting gRNA
cgctgcagcgcacgggtaccagg

SEQ ID NO: 612 - DNA, 23 bp, Artificial Sequence
  HLA-A targeting gRNA
atgaaggaggctgatgcctgagg

SEQ ID NO: 613 - DNA, 23 bp, Artificial Sequence
  HLA-A targeting gRNA
acagaagatgtggctagaggagg

SEQ ID NO: 614 - DNA, 23 bp, Artificial Sequence
  HLA-A targeting gRNA
atcttctgtgggatctgaccagg

SEQ ID NO: 615 - DNA, 23 bp, Artificial Sequence
  HLA-A targeting gRNA
cccacagaagatgtggctagagg

SEQ ID NO: 616 - DNA, 23 bp, Artificial Sequence
  HLA-A targeting gRNA
cctctagccacatcttctgtggg

SEQ ID NO: 617 - DNA, 23 bp, Artificial Sequence
  HLA-A targeting gRNA
gtcagatcccacagaagatgtgg

SEQ ID NO: 618 - DNA, 23 bp, Artificial Sequence
  HLA-A targeting gRNA
tcctctagccacatcttctgtgg

SEQ ID NO: 619 - DNA, 23 bp, Artificial Sequence
  HLA-A targeting gRNA
gggctccccgcggccgggccggg

SEQ ID NO: 620 - DNA, 23 bp, Artificial Sequence
  HLA-A targeting gRNA
aggctgatgcctgaggtccttgg

SEQ ID NO: 621 - DNA, 23 bp, Artificial Sequence
  HLA-A targeting gRNA
cacaatatcccaaggacctcagg

SEQ ID NO: 622 - DNA, 23 bp, Artificial Sequence
  HLA-A targeting gRNA
ggctgatgcctgaggtccttggg

SEQ ID NO: 623 - DNA, 23 bp, Artificial Sequence
  HLA-A targeting gRNA
aggcattttgcatctgtcatggg

SEQ ID NO: 624 - DNA, 23 bp, Artificial Sequence
  HLA-A targeting gRNA
caggcattttgcatctgtcatgg

SEQ ID NO: 625 - DNA, 23 bp, Artificial Sequence
  HLA-A targeting gRNA
cccagcagtcacaagtcacaggg

SEQ ID NO: 626 - DNA, 23 bp, Artificial Sequence
  HLA-A targeting gRNA
ccctgtgacttgtgactgctggg

SEQ ID NO: 627 - DNA, 23 bp, Artificial Sequence
  HLA-A targeting gRNA
tggaaggttccatcccctgcagg

SEQ ID NO: 628 - DNA, 23 bp, Artificial Sequence
  HLA-A targeting gRNA
aagcggggctccccgcggccggg

SEQ ID NO: 629 - DNA, 23 bp, Artificial Sequence
  HLA-A targeting gRNA
gaagcggggctccccgcggccgg

SEQ ID NO: 630 - DNA, 23 bp, Artificial Sequence
  HLA-A targeting gRNA
ggggctccccgcggccgggccgg

SEQ ID NO: 631 - DNA, 23 bp, Artificial Sequence
  HLA-A targeting gRNA
aattgtgtcagagagcagggcgg

SEQ ID NO: 632 - DNA, 23 bp, Artificial Sequence
  HLA-A targeting gRNA
cctgctctctgacacaattaagg

SEQ ID NO: 633 - DNA, 23 bp, Artificial Sequence
  HLA-A targeting gRNA
ccttaattgtgtcagagagcagg

SEQ ID NO: 634 - DNA, 23 bp, Artificial Sequence
  HLA-A targeting gRNA
ctgctctctgacacaattaaggg

SEQ ID NO: 635 - DNA, 23 bp, Artificial Sequence
  HLA-A targeting gRNA
cttaattgtgtcagagagcaggg

SEQ ID NO: 636 - DNA, 23 bp, Artificial Sequence
  HLA-A targeting gRNA
agtgctggcacacagggcccagg

SEQ ID NO: 637 - DNA, 23 bp, Artificial Sequence
  HLA-A targeting gRNA
ctagaggaggaattgtggggtgg

SEQ ID NO: 638 - DNA, 23 bp, Artificial Sequence
  HLA-A targeting gRNA
ctggcacacagggcccaggctgg

SEQ ID NO: 639 - DNA, 23 bp, Artificial Sequence
  HLA-A targeting gRNA
gtggctagaggaggaattgtggg

SEQ ID NO: 640 - DNA, 23 bp, Artificial Sequence
  HLA-A targeting gRNA
tggcacacagggcccaggctggg

SEQ ID NO: 641 - DNA, 23 bp, Artificial Sequence
  HLA-A targeting gRNA
tggctagaggaggaattgtgggg

SEQ ID NO: 642 - DNA, 23 bp, Artificial Sequence
  HLA-A targeting gRNA
tgtggctagaggaggaattgtgg

SEQ ID NO: 643 - DNA, 23 bp, Artificial Sequence
  HLA-A targeting gRNA
ctcggggtcccgcggcttcgggg

SEQ ID NO: 644 - DNA, 23 bp, Artificial Sequence
  HLA-A targeting gRNA
gtctcggggtcccgcggcttcgg

SEQ ID NO: 645 - DNA, 23 bp, Artificial Sequence
  HLA-A targeting gRNA
tctcggggtcccgcggcttcggg

SEQ ID NO: 646 - DNA, 23 bp, Artificial Sequence
  HLA-A targeting gRNA
gacttgtgactgctgggatcagg

SEQ ID NO: 647 - DNA, 23 bp, Artificial Sequence
  HLA-A targeting gRNA
tcccagcagtcacaagtcacagg

SEQ ID NO: 648 - DNA, 23 bp, Artificial Sequence
  HLA-A targeting gRNA
ggttccatcccctgcaggcctgg

SEQ ID NO: 649 - DNA, 23 bp, Artificial Sequence
  HLA-A targeting gRNA
ctcccaaacacaatatcccaagg

SEQ ID NO: 650 - DNA, 23 bp, Artificial Sequence
  HLA-A targeting gRNA
ggtccttgggatattgtgtttgg

SEQ ID NO: 651 - DNA, 23 bp, Artificial Sequence
  HLA-A targeting gRNA
gtccttgggatattgtgtttggg

SEQ ID NO: 652 - DNA, 23 bp, Artificial Sequence
  HLA-A targeting gRNA
tccgtgtcccggcccggccgcgg

SEQ ID NO: 653 - DNA, 23 bp, Artificial Sequence
  HLA-A targeting gRNA
cccgcggccgggccgggacacgg

SEQ ID NO: 654 - DNA, 23 bp, Artificial Sequence
  HLA-A targeting gRNA
ccgtgtcccggcccggccgcggg

SEQ ID NO: 655 - DNA, 23 bp, Artificial Sequence
  HLA-A targeting gRNA
acaggatctggaaacccaggagg

SEQ ID NO: 656 - DNA, 23 bp, Artificial Sequence
  HLA-A targeting gRNA
ggtacaggatctggaaacccagg

SEQ ID NO: 657 - DNA, 23 bp, Artificial Sequence
  HLA-A targeting gRNA
ttgggtgttgggcggaacagtgg

SEQ ID NO: 658 - DNA, 23 bp, Artificial Sequence
  HLA-A targeting gRNA
cgacgccgcgagccagaggatgg

SEQ ID NO: 659 - DNA, 23 bp, Artificial Sequence
  HLA-A targeting gRNA
cgagccagaggatggagccgcgg

SEQ ID NO: 660 - DNA, 23 bp, Artificial Sequence
  HLA-A targeting gRNA
gagccagaggatggagccgcggg

SEQ ID NO: 661 - DNA, 23 bp, Artificial Sequence
  HLA-A targeting gRNA
cctgggcctctcccggggcaagg

SEQ ID NO: 662 - DNA, 23 bp, Artificial Sequence
  HLA-A targeting gRNA
ccttgccccgggagaggcccagg

SEQ ID NO: 663 - DNA, 23 bp, Artificial Sequence
  HLA-A targeting gRNA
cgagacccttgccccgggagagg

SEQ ID NO: 664 - DNA, 23 bp, Artificial Sequence
  HLA-A targeting gRNA
ctctcccggggcaagggtctcgg

SEQ ID NO: 665 - DNA, 23 bp, Artificial Sequence
  HLA-A targeting gRNA
ctgggcctctcccggggcaaggg

SEQ ID NO: 666 - DNA, 23 bp, Artificial Sequence
  HLA-A targeting gRNA
cccaacacccaacacacatcagg

SEQ ID NO: 667 - DNA, 23 bp, Artificial Sequence
  HLA-A targeting gRNA
cctgatgtgtgttgggtgttggg

SEQ ID NO: 668 - DNA, 23 bp, Artificial Sequence
  HLA-A targeting gRNA
gcctgatgtgtgttgggtgttgg

SEQ ID NO: 669 - DNA, 23 bp, Artificial Sequence
  HLA-A targeting gRNA
tggagggcctgatgtgtgttggg

SEQ ID NO: 670 - DNA, 23 bp, Artificial Sequence
  HLA-A targeting gRNA
ctcccggggcaagggtctcgggg

SEQ ID NO: 671 - DNA, 23 bp, Artificial Sequence
  HLA-A targeting gRNA
gaccccgagacccttgccccggg

SEQ ID NO: 672 - DNA, 23 bp, Artificial Sequence
  HLA-A targeting gRNA
gcaagggtctcggggtcccgcgg

SEQ ID NO: 673 - DNA, 23 bp, Artificial Sequence
  HLA-A targeting gRNA
ggaccccgagacccttgccccgg

SEQ ID NO: 674 - DNA, 23 bp, Artificial Sequence
  HLA-A targeting gRNA
tctcccggggcaagggtctcggg

SEQ ID NO: 675 - DNA, 23 bp, Artificial Sequence
  HLA-A targeting gRNA
aggcgcctgggcctctcccgggg

SEQ ID NO: 676 - DNA, 23 bp, Artificial Sequence
  HLA-A targeting gRNA
ctccctccttttctatctgtggg

SEQ ID NO: 677 - DNA, 23 bp, Artificial Sequence
  HLA-A targeting gRNA
cttcccacagatagaaaaggagg

SEQ ID NO: 678 - DNA, 23 bp, Artificial Sequence
  HLA-A targeting gRNA
ttcccacagatagaaaaggaggg

SEQ ID NO: 679 - DNA, 23 bp, Artificial Sequence
  HLA-A targeting gRNA
tttcttcccacagatagaaaagg

SEQ ID NO: 680 - DNA, 23 bp, Artificial Sequence
  HLA-A targeting gRNA
aaccactcatcagtattcgaggg

SEQ ID NO: 681 - DNA, 23 bp, Artificial Sequence
  HLA-A targeting gRNA
atccctcgaatactgatgagtgg

SEQ ID NO: 682 - DNA, 23 bp, Artificial Sequence
  HLA-A targeting gRNA
gaaccactcatcagtattcgagg

SEQ ID NO: 683 - DNA, 23 bp, Artificial Sequence
  HLA-A targeting gRNA
gaggaaaagtcacgggcccaagg

SEQ ID NO: 684 - DNA, 23 bp, Artificial Sequence
  HLA-A targeting gRNA
ggcccgtgacttttcctctcagg

SEQ ID NO: 685 - DNA, 23 bp, Artificial Sequence
  HLA-A targeting gRNA
ggcctgagaggaaaagtcacggg

SEQ ID NO: 686 - DNA, 23 bp, Artificial Sequence
  HLA-A targeting gRNA
aaacatgaagaaagcaggtgtgg

SEQ ID NO: 687 - DNA, 23 bp, Artificial Sequence
  HLA-A targeting gRNA
aacatgaagaaagcaggtgtggg

SEQ ID NO: 688 - DNA, 23 bp, Artificial Sequence
  HLA-A targeting gRNA
aagaaagcaggtgtgggtcctgg

SEQ ID NO: 689 - DNA, 23 bp, Artificial Sequence
  HLA-A targeting gRNA
gtcacaggggaaggtccctgagg

SEQ ID NO: 690 - DNA, 23 bp, Artificial Sequence
  HLA-A targeting gRNA
tcaggaaacatgaagaaagcagg

SEQ ID NO: 691 - DNA, 23 bp, Artificial Sequence
  HLA-A targeting gRNA
aaaggcgcctgggcctctcccgg

SEQ ID NO: 692 - DNA, 23 bp, Artificial Sequence
  HLA-A targeting gRNA
tggaggaggaagagctcaggtgg

SEQ ID NO: 693 - DNA, 23 bp, Artificial Sequence
  HLA-A targeting gRNA
ttaagggataaaatctctgaagg

SEQ ID NO: 694 - DNA, 23 bp, Artificial Sequence
  HLA-A targeting gRNA
cacgatggggatggtgggctggg

SEQ ID NO: 695 - DNA, 23 bp, Artificial Sequence
  HLA-A targeting gRNA
ccacgatggggatggtgggctgg

SEQ ID NO: 696 - DNA, 23 bp, Artificial Sequence
  HLA-A targeting gRNA
gtgagacagctgccttgtgtggg

SEQ ID NO: 697 - DNA, 23 bp, Artificial Sequence
  HLA-A targeting gRNA
tgtgagacagctgccttgtgtgg

SEQ ID NO: 698 - DNA, 23 bp, Artificial Sequence
  HLA-A targeting gRNA
aatctgtccttcattttaacagg

SEQ ID NO: 699 - DNA, 23 bp, Artificial Sequence
  HLA-A targeting gRNA
taaagcacctgttaaaatgaagg

SEQ ID NO: 700 - DNA, 23 bp, Artificial Sequence
  HLA-A targeting gRNA
ctgaaaatgaaaccgggtaaagg

SEQ ID NO: 701 - DNA, 23 bp, Artificial Sequence
  HLA-A targeting gRNA
ctgccttgtgtgggactgagagg

SEQ ID NO: 702 - DNA, 23 bp, Artificial Sequence
  HLA-A targeting gRNA
ttgcctctcagtcccacacaagg

SEQ ID NO: 703 - DNA, 23 bp, Artificial Sequence
  HLA-A targeting gRNA
gaggcccaggcgcctttacccgg

SEQ ID NO: 704 - DNA, 23 bp, Artificial Sequence
  HLA-A targeting gRNA
gaaaccgggtaaaggcgcctggg

SEQ ID NO: 705 - DNA, 23 bp, Artificial Sequence
  HLA-A targeting gRNA
tgaaaccgggtaaaggcgcctgg

SEQ ID NO: 706 - DNA, 23 bp, Artificial Sequence
  HLA-A targeting gRNA
gcgcccgcggctccatcctctgg

SEQ ID NO: 707 - DNA, 23 bp, Artificial Sequence
  HLA-A targeting gRNA
acccgcccaggtctgggtcaggg

SEQ ID NO: 708 - DNA, 23 bp, Artificial Sequence
  HLA-A targeting gRNA
cacccgcccaggtctgggtcagg

SEQ ID NO: 709 - DNA, 23 bp, Artificial Sequence
  HLA-A targeting gRNA
cagacctgggcgggtgagtgcgg

SEQ ID NO: 710 - DNA, 23 bp, Artificial Sequence
  HLA-A targeting gRNA
cgcactcacccgcccaggtctgg

SEQ ID NO: 711 - DNA, 23 bp, Artificial Sequence
  HLA-A targeting gRNA
gaccccgcactcacccgcccagg

SEQ ID NO: 712 - DNA, 23 bp, Artificial Sequence
  HLA-A targeting gRNA
gacctgggcgggtgagtgcgggg

SEQ ID NO: 713 - DNA, 23 bp, Artificial Sequence
  HLA-A targeting gRNA
gcactcacccgcccaggtctggg

SEQ ID NO: 714 - DNA, 23 bp, Artificial Sequence
  HLA-A targeting gRNA
gccctgacccagacctgggcggg

SEQ ID NO: 715 - DNA, 23 bp, Artificial Sequence
  HLA-A targeting gRNA
agacctgggcgggtgagtgcggg

SEQ ID NO: 716 - DNA, 23 bp, Artificial Sequence
  HLA-A targeting gRNA
atgtttcctgatcccgccctggg

SEQ ID NO: 717 - DNA, 23 bp, Artificial Sequence
  HLA-A targeting gRNA
catgtttcctgatcccgccctgg

SEQ ID NO: 718 - DNA, 23 bp, Artificial Sequence
  HLA-A targeting gRNA
gtgtgactgcagacccagggcgg

SEQ ID NO: 719 - DNA, 23 bp, Artificial Sequence
  HLA-A targeting gRNA
tgcagacccagggcgggatcagg

SEQ ID NO: 720 - DNA, 23 bp, Artificial Sequence
  HLA-A targeting gRNA
tgtgactgcagacccagggcggg

SEQ ID NO: 721 - DNA, 23 bp, Artificial Sequence
  HLA-A targeting gRNA
cgtgggcatcattgctggcctgg

SEQ ID NO: 722 - DNA, 23 bp, Artificial Sequence
  HLA-A targeting gRNA
agtagccgcgcagggtccccagg

SEQ ID NO: 723 - DNA, 23 bp, Artificial Sequence
  HLA-A targeting gRNA
tcatcccccacggacgggccagg

SEQ ID NO: 724 - DNA, 23 bp, Artificial Sequence
  HLA-A targeting gRNA
gcgatcagggaggcgccccgtgg

SEQ ID NO: 725 - DNA, 23 bp, Artificial Sequence
  HLA-A targeting gRNA
tctggttgtagtagccgcgcagg

SEQ ID NO: 726 - DNA, 23 bp, Artificial Sequence
  HLA-A targeting gRNA
gtgaccccggcccggggcgcagg

SEQ ID NO: 727 - DNA, 23 bp, Artificial Sequence
  HLA-A targeting gRNA
caagtcacaaagggaagggcagg

SEQ ID NO: 728 - DNA, 23 bp, Artificial Sequence
  HLA-A targeting gRNA
cggtgagtgaccccggcccgggg

SEQ ID NO: 729 - DNA, 23 bp, Artificial Sequence
  HLA-A targeting gRNA
cgtgacctgcgccccgggccggg

SEQ ID NO: 730 - DNA, 23 bp, Artificial Sequence
  HLA-A targeting gRNA
gtgacctgcgccccgggccgggg

SEQ ID NO: 731 - DNA, 23 bp, Artificial Sequence
  HLA-A targeting gRNA
tcgtgacctgcgccccgggccgg

SEQ ID NO: 732 - DNA, 23 bp, Artificial Sequence
  HLA-A targeting gRNA
gatgtgtgttgggtgttgggcgg

SEQ ID NO: 733 - DNA, 23 bp, Artificial Sequence
  HLA-A targeting gRNA
tagaggaggaattgtggggtggg

SEQ ID NO: 734 - DNA, 23 bp, Artificial Sequence
  HLA-A targeting gRNA
cgagctccgtgtcctgggtctgg

SEQ ID NO: 735 - DNA, 23 bp, Artificial Sequence
  HLA-A targeting gRNA
ctccacgagctccgtgtcctggg

SEQ ID NO: 736 - DNA, 23 bp, Artificial Sequence
  HLA-A targeting gRNA
tctccacgagctccgtgtcctgg

SEQ ID NO: 737 - DNA, 23 bp, Artificial Sequence
  HLA-A targeting gRNA
gggaggcgccccgtggcccctgg

SEQ ID NO: 738 - DNA, 23 bp, Artificial Sequence
  HLA-A targeting gRNA
ggagtggctccgcagatacctgg

SEQ ID NO: 739 - DNA, 23 bp, Artificial Sequence
  HLA-A targeting gRNA
ctcgtggagaccaggcctgcagg

SEQ ID NO: 740 - DNA, 23 bp, Artificial Sequence
  HLA-A targeting gRNA
agtggacacagctgtgctatggg

SEQ ID NO: 741 - DNA, 23 bp, Artificial Sequence
  HLA-A targeting gRNA
cagtggacacagctgtgctatgg

SEQ ID NO: 742 - DNA, 23 bp, Artificial Sequence
  HLA-A targeting gRNA
ggtagaacaaaaacagaacctgg

SEQ ID NO: 743 - DNA, 23 bp, Artificial Sequence
  HLA-A targeting gRNA
gtggacacagctgtgctatgggg

SEQ ID NO: 744 - DNA, 23 bp, Artificial Sequence
  HLA-A targeting gRNA
ttctgtttttgttctaccccagg

SEQ ID NO: 745 - DNA, 23 bp, Artificial Sequence
  HLA-A targeting gRNA
atattgtgtttgggagcccatgg

SEQ ID NO: 746 - DNA, 23 bp, Artificial Sequence
  HLA-A targeting gRNA
attgtgtttgggagcccatgggg

SEQ ID NO: 747 - DNA, 23 bp, Artificial Sequence
  HLA-A targeting gRNA
tattgtgtttgggagcccatggg

SEQ ID NO: 748 - DNA, 23 bp, Artificial Sequence
  HLA-A targeting gRNA
ttgtgtttgggagcccatggggg

SEQ ID NO: 749 - DNA, 23 bp, Artificial Sequence
  HLA-A targeting gRNA
tcttcaagtcacaaagggaaggg

SEQ ID NO: 750 - DNA, 23 bp, Artificial Sequence
  HLA-A targeting gRNA
ttcttcaagtcacaaagggaagg

SEQ ID NO: 751 - DNA, 23 bp, Artificial Sequence
  HLA-A targeting gRNA
gtcactcaccggcctcgctctgg

SEQ ID NO: 752 - DNA, 23 bp, Artificial Sequence
  HLA-A targeting gRNA
agccgcgccgggaggagggtcgg

SEQ ID NO: 753 - DNA, 23 bp, Artificial Sequence
  HLA-A targeting gRNA
agggttcttcaagtcacaaaggg

SEQ ID NO: 754 - DNA, 23 bp, Artificial Sequence
  HLA-A targeting gRNA
cagggttcttcaagtcacaaagg

SEQ ID NO: 755 - DNA, 23 bp, Artificial Sequence
  HLA-A targeting gRNA
ggctctgggaaaagaggggaagg

SEQ ID NO: 756 - DNA, 23 bp, Artificial Sequence
  HLA-A targeting gRNA
ggcgccatgacggccatcctcgg

SEQ ID NO: 757 - DNA, 23 bp, Artificial Sequence
  HLA-A targeting gRNA
gctccctccttttctatctgtgg

SEQ ID NO: 758 - DNA, 23 bp, Artificial Sequence
  HLA-A targeting gRNA
gggagaatctgagtcccggtggg

SEQ ID NO: 759 - DNA, 23 bp, Artificial Sequence
  HLA-A targeting gRNA
cgggtgagtgcggggtcgggagg

SEQ ID NO: 760 - DNA, 23 bp, Artificial Sequence
  HLA-A targeting gRNA
gggcgggtgagtgcggggtcggg

SEQ ID NO: 761 - DNA, 23 bp, Artificial Sequence
  HLA-A targeting gRNA
gggtgagtgcggggtcgggaggg

SEQ ID NO: 762 - DNA, 23 bp, Artificial Sequence
  HLA-A targeting gRNA
tgggcgggtgagtgcggggtcgg

SEQ ID NO: 763 - DNA, 23 bp, Artificial Sequence
  HLA-A targeting gRNA
ggggagaatctgagtcccggtgg

SEQ ID NO: 764 - DNA, 23 bp, Artificial Sequence
  HLA-A targeting gRNA
tctggggagaatctgagtcccgg

SEQ ID NO: 765 - DNA, 23 bp, Artificial Sequence
  HLA-A targeting gRNA
tgagtcccggtgggtgcgtgcgg

SEQ ID NO: 766 - DNA, 23 bp, Artificial Sequence
  HLA-A targeting gRNA
ccctgactttgtttctgcaaagg

SEQ ID NO: 767 - DNA, 23 bp, Artificial Sequence
  HLA-A targeting gRNA
cctttgcagaaacaaagtcaggg

SEQ ID NO: 768 - DNA, 23 bp, Artificial Sequence
  HLA-A targeting gRNA
gcctttgcagaaacaaagtcagg

SEQ ID NO: 769 - DNA, 23 bp, Artificial Sequence
  HLA-A targeting gRNA
cgcctgtagatctcccgggctgg

SEQ ID NO: 770 - DNA, 23 bp, Artificial Sequence
  HLA-A targeting gRNA
cgggagatctacaggcgatcagg

SEQ ID NO: 771 - DNA, 23 bp, Artificial Sequence
  HLA-A targeting gRNA
ctgatcgcctgtagatctcccgg

SEQ ID NO: 772 - DNA, 23 bp, Artificial Sequence
  HLA-A targeting gRNA
ggccagcccgggagatctacagg

SEQ ID NO: 773 - DNA, 23 bp, Artificial Sequence
  HLA-A targeting gRNA
tgatcgcctgtagatctcccggg

SEQ ID NO: 774 - DNA, 23 bp, Artificial Sequence
  HLA-A targeting gRNA
gccgcgccgggaggagggtcggg

SEQ ID NO: 775 - DNA, 23 bp, Artificial Sequence
  HLA-A targeting gRNA
ccaggtcgcccacagtctccggg

SEQ ID NO: 776 - DNA, 23 bp, Artificial Sequence
  HLA-A targeting gRNA
cccggagactgtgggcgacctgg

SEQ ID NO: 777 - DNA, 23 bp, Artificial Sequence
  HLA-A targeting gRNA
gccaggtcgcccacagtctccgg

SEQ ID NO: 778 - DNA, 23 bp, Artificial Sequence
  HLA-A targeting gRNA
tgagagacacatcagagccctgg

SEQ ID NO: 779 - DNA, 23 bp, Artificial Sequence
  HLA-A targeting gRNA
gcgacctggcccgtccgtggggg

SEQ ID NO: 780 - DNA, 23 bp, Artificial Sequence
  HLA-A targeting gRNA
ggcgacctggcccgtccgtgggg

SEQ ID NO: 781 - DNA, 23 bp, Artificial Sequence
  HLA-A targeting gRNA
gggcgacctggcccgtccgtggg

SEQ ID NO: 782 - DNA, 23 bp, Artificial Sequence
  HLA-A targeting gRNA
tgggcgacctggcccgtccgtgg

SEQ ID NO: 783 - DNA, 23 bp, Artificial Sequence
  HLA-A targeting gRNA
gcgaggccggtgagtgaccccgg

SEQ ID NO: 784 - DNA, 23 bp, Artificial Sequence
  HLA-A targeting gRNA
agatctacaggcgatcagggagg

SEQ ID NO: 785 - DNA, 23 bp, Artificial Sequence
  HLA-A targeting gRNA
gcccgaccctcctcccggcgcgg

SEQ ID NO: 786 - DNA, 23 bp, Artificial Sequence
  HLA-A targeting gRNA
gggagatctacaggcgatcaggg

SEQ ID NO: 787 - DNA, 23 bp, Artificial Sequence
  HLA-A targeting gRNA
cgccctccctctggtcctgaggg

SEQ ID NO: 788 - DNA, 23 bp, Artificial Sequence
  HLA-A targeting gRNA
ctagaatatcgccctccctctgg

SEQ ID NO: 789 - DNA, 23 bp, Artificial Sequence
  HLA-A targeting gRNA
ggagggcgatattctagtgttgg

SEQ ID NO: 790 - DNA, 23 bp, Artificial Sequence
  HLA-A targeting gRNA
tcgccctccctctggtcctgagg

SEQ ID NO: 791 - DNA, 23 bp, Artificial Sequence
  HLA-A targeting gRNA
acggccatcctcggcgtctgggg

SEQ ID NO: 792 - DNA, 23 bp, Artificial Sequence
  HLA-A targeting gRNA
gacggccatcctcggcgtctggg

SEQ ID NO: 793 - DNA, 23 bp, Artificial Sequence
  HLA-A targeting gRNA
tgacggccatcctcggcgtctgg

SEQ ID NO: 794 - DNA, 23 bp, Artificial Sequence
  HLA-A targeting gRNA
gacgccgaggatggccgtcatgg

SEQ ID NO: 795 - DNA, 23 bp, Artificial Sequence
  HLA-A targeting gRNA
ttctccccagacgccgaggatgg

SEQ ID NO: 796 - DNA, 23 bp, Artificial Sequence
  HLA-A targeting gRNA
cagattctccccagacgccgagg

SEQ ID NO: 797 - DNA, 23 bp, Artificial Sequence
  HLA-A targeting gRNA
ctggaaacccgacacccaatggg

SEQ ID NO: 798 - DNA, 23 bp, Artificial Sequence
  HLA-A targeting gRNA
tctggaaacccgacacccaatgg

SEQ ID NO: 799 - DNA, 23 bp, Artificial Sequence
  HLA-A targeting gRNA
acacagggcccaggctgggtagg

SEQ ID NO: 800 - DNA, 23 bp, Artificial Sequence
  HLA-A targeting gRNA
tctcactcccattgggtgtcggg

SEQ ID NO: 801 - DNA, 23 bp, Artificial Sequence
  HLA-A targeting gRNA
ttctcactcccattgggtgtcgg

SEQ ID NO: 802 - DNA, 23 bp, Artificial Sequence
  HLA-A targeting gRNA
aaagtccgcacgcacccaccggg

SEQ ID NO: 803 - DNA, 23 bp, Artificial Sequence
  HLA-A targeting gRNA
taaagtccgcacgcacccaccgg

SEQ ID NO: 804 - DNA, 23 bp, Artificial Sequence
  HLA-A targeting gRNA
cacccaatgggagtgagaactgg

SEQ ID NO: 805 - DNA, 23 bp, Artificial Sequence
  HLA-A targeting gRNA
acccaatgggagtgagaactggg

SEQ ID NO: 806 - DNA, 23 bp, Artificial Sequence
  HLA-A targeting gRNA
gtaggcataatgtgaggaggtgg

SEQ ID NO: 807 - DNA, 23 bp, Artificial Sequence
  HLA-A targeting gRNA
taggcataatgtgaggaggtggg

SEQ ID NO: 808 - DNA, 23 bp, Artificial Sequence
  HLA-A targeting gRNA
gcgaccgcgacgacactgattgg

SEQ ID NO: 809 - DNA, 23 bp, Artificial Sequence
  HLA-A targeting gRNA
acccagttctcactcccattggg

SEQ ID NO: 810 - DNA, 23 bp, Artificial Sequence
  HLA-A targeting gRNA
gacccagttctcactcccattgg

SEQ ID NO: 811 - DNA, 23 bp, Artificial Sequence
  HLA-A targeting gRNA
aggcataatgtgaggaggtgggg

SEQ ID NO: 812 - DNA, 23 bp, Artificial Sequence
  HLA-A targeting gRNA
gaagccaatcagtgtcgtcgcgg

SEQ ID NO: 813 - DNA, 23 bp, Artificial Sequence
  HLA-A targeting gRNA
agcttgtaaaggtgagagcctgg

SEQ ID NO: 814 - DNA, 23 bp, Artificial Sequence
  HLA-A targeting gRNA
atggacaggacacctgggatggg

SEQ ID NO: 815 - DNA, 23 bp, Artificial Sequence
  HLA-A targeting gRNA
caacacacatcaggccctccagg

SEQ ID NO: 816 - DNA, 23 bp, Artificial Sequence
  HLA-A targeting gRNA
ctggagggcctgatgtgtgttgg

SEQ ID NO: 817 - DNA, 23 bp, Artificial Sequence
  HLA-A targeting gRNA
tggacaggacacctgggatgggg

SEQ ID NO: 818 - DNA, 23 bp, Artificial Sequence
  HLA-A targeting gRNA
tgtaaaggtgagagcctggaggg

SEQ ID NO: 819 - DNA, 23 bp, Artificial Sequence
  HLA-A targeting gRNA
ttgtaaaggtgagagcctggagg

SEQ ID NO: 820 - DNA, 23 bp, Artificial Sequence
  HLA-A targeting gRNA
acgacactgattggcttctctgg

SEQ ID NO: 821 - DNA, 23 bp, Artificial Sequence
  HLA-A targeting gRNA
gtgcggggtcgggagggaaacgg

SEQ ID NO: 822 - DNA, 23 bp, Artificial Sequence
  HLA-A targeting gRNA
tctccgcagggtagaagctcagg

SEQ ID NO: 823 - DNA, 23 bp, Artificial Sequence
  HLA-A targeting gRNA
gggatggtgggctgggaagacgg

SEQ ID NO: 824 - DNA, 23 bp, Artificial Sequence
  HLA-A targeting gRNA
gtgggctgggaagacggctctgg

SEQ ID NO: 825 - DNA, 23 bp, Artificial Sequence
  HLA-A targeting gRNA
tgggctgggaagacggctctggg

SEQ ID NO: 826 - DNA, 23 bp, Artificial Sequence
  HLA-A targeting gRNA
aaaatctctgaaggaatgacggg

SEQ ID NO: 827 - DNA, 23 bp, Artificial Sequence
  HLA-A targeting gRNA
aattcgtatctgtcacagtgagg

SEQ ID NO: 828 - DNA, 23 bp, Artificial Sequence
  HLA-A targeting gRNA
aagtcgctgttccctcttcaggg

SEQ ID NO: 829 - DNA, 23 bp, Artificial Sequence
  HLA-A targeting gRNA
aatggacaggacacctgggatgg

SEQ ID NO: 830 - DNA, 23 bp, Artificial Sequence
  HLA-A targeting gRNA
acactcctccagcacacatgtgg

SEQ ID NO: 831 - DNA, 23 bp, Artificial Sequence
  HLA-A targeting gRNA
acatgtggctatcttgagaatgg

SEQ ID NO: 832 - DNA, 23 bp, Artificial Sequence
  HLA-A targeting gRNA
acggaataggagattatcccagg

SEQ ID NO: 833 - DNA, 23 bp, Artificial Sequence
  HLA-A targeting gRNA
agcctctctgacctttagcaggg

SEQ ID NO: 834 - DNA, 23 bp, Artificial Sequence
  HLA-A targeting gRNA
agctcagggcccagcacctcagg

SEQ ID NO: 835 - DNA, 23 bp, Artificial Sequence
  HLA-A targeting gRNA
aggacacctgggatggggaaggg

SEQ ID NO: 836 - DNA, 23 bp, Artificial Sequence
  HLA-A targeting gRNA
aggaccttcaggagggcggttgg

SEQ ID NO: 837 - DNA, 23 bp, Artificial Sequence
  HLA-A targeting gRNA
aggcagggcacacttctacctgg

SEQ ID NO: 838 - DNA, 23 bp, Artificial Sequence
  HLA-A targeting gRNA
agtgtgccctgcctcgttactgg

SEQ ID NO: 839 - DNA, 23 bp, Artificial Sequence
  HLA-A targeting gRNA
caagacttggaggttcctctagg

SEQ ID NO: 840 - DNA, 23 bp, Artificial Sequence
  HLA-A targeting gRNA
caagatagccacatgtgtgctgg

SEQ ID NO: 841 - DNA, 23 bp, Artificial Sequence
  HLA-A targeting gRNA
cactgagggttccaagacccagg

SEQ ID NO: 842 - DNA, 23 bp, Artificial Sequence
  HLA-A targeting gRNA
caggacacctgggatggggaagg

SEQ ID NO: 843 - DNA, 23 bp, Artificial Sequence
  HLA-A targeting gRNA
ccgccctcctgaaggtcctcagg

SEQ ID NO: 844 - DNA, 23 bp, Artificial Sequence
  HLA-A targeting gRNA
cctgaggaccttcaggagggcgg

SEQ ID NO: 845 - DNA, 23 bp, Artificial Sequence
  HLA-A targeting gRNA
cgccctcctgaaggtcctcaggg

SEQ ID NO: 846 - DNA, 23 bp, Artificial Sequence
  HLA-A targeting gRNA
ctagaggaacctccaagtcttgg

SEQ ID NO: 847 - DNA, 23 bp, Artificial Sequence
  HLA-A targeting gRNA
ctctgacctttagcagggtcagg

SEQ ID NO: 848 - DNA, 23 bp, Artificial Sequence
  HLA-A targeting gRNA
ctctgaggtccaagacttggagg

SEQ ID NO: 849 - DNA, 23 bp, Artificial Sequence
  HLA-A targeting gRNA
cttctctgaggtccaagacttgg

SEQ ID NO: 850 - DNA, 23 bp, Artificial Sequence
  HLA-A targeting gRNA
gaagagggaacagcgacttctgg

SEQ ID NO: 851 - DNA, 23 bp, Artificial Sequence
  HLA-A targeting gRNA
gaaggtccctgaggaccttcagg

SEQ ID NO: 852 - DNA, 23 bp, Artificial Sequence
  HLA-A targeting gRNA
gaagtcgctgttccctcttcagg

SEQ ID NO: 853 - DNA, 23 bp, Artificial Sequence
  HLA-A targeting gRNA
gaccctgctaaaggtcagagagg

SEQ ID NO: 854 - DNA, 23 bp, Artificial Sequence
  HLA-A targeting gRNA
gagcctctctgacctttagcagg

SEQ ID NO: 855 - DNA, 23 bp, Artificial Sequence
  HLA-A targeting gRNA
gaggaggaagagctcaggtgggg

SEQ ID NO: 856 - DNA, 23 bp, Artificial Sequence
  HLA-A targeting gRNA
gatagccacatgtgtgctggagg

SEQ ID NO: 857 - DNA, 23 bp, Artificial Sequence
  HLA-A targeting gRNA
gcacacttctacctgggtcttgg

SEQ ID NO: 858 - DNA, 23 bp, Artificial Sequence
  HLA-A targeting gRNA
ggaggaggaagagctcaggtggg

SEQ ID NO: 859 - DNA, 23 bp, Artificial Sequence
  HLA-A targeting gRNA
ggcagggcacacttctacctggg

SEQ ID NO: 860 - DNA, 23 bp, Artificial Sequence
  HLA-A targeting gRNA
ggtccctgaggaccttcaggagg

SEQ ID NO: 861 - DNA, 23 bp, Artificial Sequence
  HLA-A targeting gRNA
gtccctgaggaccttcaggaggg

SEQ ID NO: 862 - DNA, 23 bp, Artificial Sequence
  HLA-A targeting gRNA
gtgcttcccagtaacgaggcagg

SEQ ID NO: 863 - DNA, 23 bp, Artificial Sequence
  HLA-A targeting gRNA
gtgtgccctgcctcgttactggg

SEQ ID NO: 864 - DNA, 23 bp, Artificial Sequence
  HLA-A targeting gRNA
tctgacctttagcagggtcaggg

SEQ ID NO: 865 - DNA, 23 bp, Artificial Sequence
  HLA-A targeting gRNA
tgcttcccagtaacgaggcaggg

SEQ ID NO: 866 - DNA, 23 bp, Artificial Sequence
  HLA-A targeting gRNA
tggaccaaccgccctcctgaagg

SEQ ID NO: 867 - DNA, 23 bp, Artificial Sequence
  HLA-A targeting gRNA
tggctatcttgagaatggacagg

SEQ ID NO: 868 - DNA, 23 bp, Artificial Sequence
  HLA-A targeting gRNA
tgggataatctcctattccgtgg

SEQ ID NO: 869 - DNA, 23 bp, Artificial Sequence
  HLA-A targeting gRNA
tgtgctcccttccccatcccagg

SEQ ID NO: 870 - DNA, 23 bp, Artificial Sequence
  HLA-A targeting gRNA
tgtggtggtgccttctggacagg

SEQ ID NO: 871 - DNA, 23 bp, Artificial Sequence
  HLA-A targeting gRNA
ttcaggagggcggttggtccagg

SEQ ID NO: 872 - DNA, 23 bp, Artificial Sequence
  HLA-A targeting gRNA
ttgagaatggacaggacacctgg

SEQ ID NO: 873 - DNA, 23 bp, Artificial Sequence
  HLA-A targeting gRNA
tgagaatggacaggacacctggg

SEQ ID NO: 874 - DNA, 23 bp, Artificial Sequence
  HLA-A targeting gRNA
aagacggctctgggaaaagaggg

SEQ ID NO: 875 - DNA, 23 bp, Artificial Sequence
  HLA-A targeting gRNA
agacggctctgggaaaagagggg

SEQ ID NO: 876 - DNA, 23 bp, Artificial Sequence
  HLA-A targeting gRNA
gaagacggctctgggaaaagagg

SEQ ID NO: 877 - DNA, 23 bp, Artificial Sequence
  HLA-A targeting gRNA
catttctggaaacttctctgagg

SEQ ID NO: 878 - DNA, 23 bp, Artificial Sequence
  HLA-A targeting gRNA
taaaatctctgaaggaatgacgg

SEQ ID NO: 879 - DNA, 23 bp, Artificial Sequence
  HLA-A targeting gRNA
aaaattctagtccctgaagaggg

SEQ ID NO: 880 - DNA, 23 bp, Artificial Sequence
  HLA-A targeting gRNA
actagaattttccacggaatagg

SEQ ID NO: 881 - DNA, 23 bp, Artificial Sequence
  HLA-A targeting gRNA
gaaaattctagtccctgaagagg

SEQ ID NO: 882 - DNA, 23 bp, Artificial Sequence
  HLA-A targeting gRNA
tcagggactagaattttccacgg

SEQ ID NO: 883 - DNA, 23 bp, Artificial Sequence
  HLA-A targeting gRNA
aaccctcgtcctgctactctcgg

SEQ ID NO: 884 - DNA, 23 bp, Artificial Sequence
  HLA-A targeting gRNA
accctcgtcctgctactctcggg

SEQ ID NO: 885 - DNA, 23 bp, Artificial Sequence
  HLA-A targeting gRNA
agagtagcaggacgagggttcgg

SEQ ID NO: 886 - DNA, 23 bp, Artificial Sequence
  HLA-A targeting gRNA
cccccgagagtagcaggacgagg

SEQ ID NO: 887 - DNA, 23 bp, Artificial Sequence
  HLA-A targeting gRNA
gagtagcaggacgagggttcggg

SEQ ID NO: 888 - DNA, 23 bp, Artificial Sequence
  HLA-A targeting gRNA
gccggtgagtgaccccggcccgg

SEQ ID NO: 889 - DNA, 23 bp, Artificial Sequence
  HLA-A targeting gRNA
cccgggccggggtcactcaccgg

SEQ ID NO: 890 - DNA, 23 bp, Artificial Sequence
  HLA-A targeting gRNA
ccggtgagtgaccccggcccggg

SEQ ID NO: 891 - DNA, 23 bp, Artificial Sequence
  HLA-A targeting gRNA
ggggtgggtgagctcccccatgg

SEQ ID NO: 892 - DNA, 23 bp, Artificial Sequence
  HLA-A targeting gRNA
gggtgggtgagctcccccatggg

SEQ ID NO: 893 - DNA, 23 bp, Artificial Sequence
  HLA-A targeting gRNA
ggtccgcgtcgtgagtatccagg

SEQ ID NO: 894 - DNA, 23 bp, Artificial Sequence
  HLA-A targeting gRNA
tcatgtcttttagggaaagcagg

SEQ ID NO: 895 - DNA, 23 bp, Artificial Sequence
  HLA-A targeting gRNA
actccacgcacgtgccctccagg

SEQ ID NO: 896 - DNA, 23 bp, Artificial Sequence
  HLA-A targeting gRNA
ccaccacagccgcccacttctgg

SEQ ID NO: 897 - DNA, 23 bp, Artificial Sequence
  HLA-A targeting gRNA
cttccagaagtgggcggctgtgg

SEQ ID NO: 898 - DNA, 23 bp, Artificial Sequence
  HLA-A targeting gRNA
gcggctgtggtggtgccttctgg

SEQ ID NO: 899 - DNA, 23 bp, Artificial Sequence
  HLA-A targeting gRNA
agaaaagaaactgcggagttggg

SEQ ID NO: 900 - DNA, 23 bp, Artificial Sequence
  HLA-A targeting gRNA
gaaaagaaactgcggagttgggg

SEQ ID NO: 901 - DNA, 23 bp, Artificial Sequence
  HLA-A targeting gRNA
gagaaaagaaactgcggagttgg

SEQ ID NO: 902 - DNA, 23 bp, Artificial Sequence
  HLA-A targeting gRNA
ggtcatggtggacatgggggtgg

SEQ ID NO: 903 - DNA, 23 bp, Artificial Sequence
  HLA-A targeting gRNA
gtcatggtggacatgggggtggg

SEQ ID NO: 904 - DNA, 23 bp, Artificial Sequence
  HLA-A targeting gRNA
tcatggtggacatgggggtgggg

SEQ ID NO: 905 - DNA, 23 bp, Artificial Sequence
  HLA-A targeting gRNA
gcggagttggggaatccccaagg

SEQ ID NO: 906 - DNA, 23 bp, Artificial Sequence
  HLA-A targeting gRNA
gcgccgggaggagggtcgggcgg

SEQ ID NO: 907 - DNA, 23 bp, Artificial Sequence
  HLA-A targeting gRNA
ggtcggggcggggcggggctcgg

SEQ ID NO: 908 - DNA, 23 bp, Artificial Sequence
  HLA-A targeting gRNA
gtcggggcggggcggggctcggg

SEQ ID NO: 909 - DNA, 23 bp, Artificial Sequence
  HLA-A targeting gRNA
tcggggcggggcggggctcgggg

SEQ ID NO: 910 - DNA, 23 bp, Artificial Sequence
  HLA-A targeting gRNA
cggggcggggcggggctcggggg

SEQ ID NO: 911 - DNA, 23 bp, Artificial Sequence
  HLA-A targeting gRNA
aattatgggcctacccagcctgg

SEQ ID NO: 912 - DNA, 23 bp, Artificial Sequence
  HLA-A targeting gRNA
attatgggcctacccagcctggg

SEQ ID NO: 913 - DNA, 23 bp, Artificial Sequence
  HLA-A targeting gRNA
gctgggtaggcccataattgtgg

SEQ ID NO: 914 - DNA, 23 bp, Artificial Sequence
  HLA-A targeting gRNA
ggagcagttgagagcctacctgg

SEQ ID NO: 915 - DNA, 23 bp, Artificial Sequence
  HLA-A targeting gRNA
gagagccacgcctggggccctgg

SEQ ID NO: 916 - DNA, 23 bp, Artificial Sequence
  HLA-A targeting gRNA
agttggggaatccccaaggctgg

SEQ ID NO: 917 - DNA, 23 bp, Artificial Sequence
  HLA-A targeting gRNA
gttggggaatccccaaggctggg

SEQ ID NO: 918 - DNA, 23 bp, Artificial Sequence
  HLA-A targeting gRNA
attggggagtcccagccttgggg

SEQ ID NO: 919 - DNA, 23 bp, Artificial Sequence
  HLA-A targeting gRNA
gattggggagtcccagccttggg

SEQ ID NO: 920 - DNA, 23 bp, Artificial Sequence
  HLA-A targeting gRNA
tggtggacatgggggtggggtgg

SEQ ID NO: 921 - DNA, 23 bp, Artificial Sequence
  HLA-A targeting gRNA
ggattggggagtcccagccttgg

SEQ ID NO: 922 - DNA, 23 bp, Artificial Sequence
  HLA-A targeting gRNA
aagtcccagggccccaggcgtgg

SEQ ID NO: 923 - DNA, 23 bp, Artificial Sequence
  HLA-A targeting gRNA
agagccacgcctggggccctggg

SEQ ID NO: 924 - DNA, 23 bp, Artificial Sequence
  HLA-A targeting gRNA
aagagcgcaggtcctctttcagg

SEQ ID NO: 925 - DNA, 23 bp, Artificial Sequence
  HLA-A targeting gRNA
agagcgcaggtcctctttcaggg

SEQ ID NO: 926 - DNA, 23 bp, Artificial Sequence
  HLA-A targeting gRNA
gagagggagaaaagaaactgcgg

SEQ ID NO: 927 - DNA, 23 bp, Artificial Sequence
  HLA-A targeting gRNA
tgaaagaggacctgcgctcttgg

SEQ ID NO: 928 - DNA, 23 bp, Artificial Sequence
  HLA-A targeting gRNA
gggcgaagtcccagggccccagg

SEQ ID NO: 929 - DNA, 23 bp, Artificial Sequence
  HLA-A targeting gRNA
caatccatacaccgccttcgggg

SEQ ID NO: 930 - DNA, 23 bp, Artificial Sequence
  HLA-A targeting gRNA
caggccccgaaggcggtgtatgg

SEQ ID NO: 931 - DNA, 23 bp, Artificial Sequence
  HLA-A targeting gRNA
ccaatccatacaccgccttcggg

SEQ ID NO: 932 - DNA, 23 bp, Artificial Sequence
  HLA-A targeting gRNA
cccaatccatacaccgccttcgg

SEQ ID NO: 933 - DNA, 23 bp, Artificial Sequence
  HLA-A targeting gRNA
cccgaaggcggtgtatggattgg

SEQ ID NO: 934 - DNA, 23 bp, Artificial Sequence
  HLA-A targeting gRNA
ccgaaggcggtgtatggattggg

SEQ ID NO: 935 - DNA, 23 bp, Artificial Sequence
  HLA-A targeting gRNA
cgaaggcggtgtatggattgggg

SEQ ID NO: 936 - DNA, 23 bp, Artificial Sequence
  HLA-A targeting gRNA
aggggtcagggcgaagtcccagg

SEQ ID NO: 937 - DNA, 23 bp, Artificial Sequence
  HLA-A targeting gRNA
ggggtcagggcgaagtcccaggg

SEQ ID NO: 938 - DNA, 23 bp, Artificial Sequence
  HLA-A targeting gRNA
agaccctgagagccacgcctggg

SEQ ID NO: 939 - DNA, 23 bp, Artificial Sequence
  HLA-A targeting gRNA
agggtctcaggccccgaaggcgg

SEQ ID NO: 940 - DNA, 23 bp, Artificial Sequence
  HLA-A targeting gRNA
ctcagggtctcaggccccgaagg

SEQ ID NO: 941 - DNA, 23 bp, Artificial Sequence
  HLA-A targeting gRNA
gaccctgagagccacgcctgggg

SEQ ID NO: 942 - DNA, 23 bp, Artificial Sequence
  HLA-A targeting gRNA
gagaccctgagagccacgcctgg

SEQ ID NO: 943 - DNA, 23 bp, Artificial Sequence
  HLA-A targeting gRNA
ggccccaggcgtggctctcaggg

SEQ ID NO: 944 - DNA, 23 bp, Artificial Sequence
  HLA-A targeting gRNA
ggcgtggctctcagggtctcagg

SEQ ID NO: 945 - DNA, 23 bp, Artificial Sequence
  HLA-A targeting gRNA
gggccccaggcgtggctctcagg

SEQ ID NO: 946 - DNA, 23 bp, Artificial Sequence
  HLA-A targeting gRNA
gacccgcccgaccctcctcccgg

SEQ ID NO: 947 - DNA, 23 bp, Artificial Sequence
  HLA-A targeting gRNA
cgccgggaggagggtcgggcggg

SEQ ID NO: 948 - DNA, 23 bp, Artificial Sequence
  HLA-A targeting gRNA
acgggggtgtcatgtcttttagg

SEQ ID NO: 949 - DNA, 23 bp, Artificial Sequence
  HLA-A targeting gRNA
agatggggtaaggagggagacgg

SEQ ID NO: 950 - DNA, 23 bp, Artificial Sequence
  HLA-A targeting gRNA
aggaagagctcaggtggggaagg

SEQ ID NO: 951 - DNA, 23 bp, Artificial Sequence
  HLA-A targeting gRNA
atggggtaaggagggagacgggg

SEQ ID NO: 952 - DNA, 23 bp, Artificial Sequence
  HLA-A targeting gRNA
cgggggtgtcatgtcttttaggg

SEQ ID NO: 953 - DNA, 23 bp, Artificial Sequence
  HLA-A targeting gRNA
gatggggtaaggagggagacggg

SEQ ID NO: 954 - DNA, 23 bp, Artificial Sequence
  HLA-A targeting gRNA
ggaagagctcaggtggggaaggg

SEQ ID NO: 955 - DNA, 23 bp, Artificial Sequence
  HLA-A targeting gRNA
tggggtaaggagggagacggggg

SEQ ID NO: 956 - DNA, 23 bp, Artificial Sequence
  HLA-A targeting gRNA
cggggcggggctcgggggaccgg

SEQ ID NO: 957 - DNA, 23 bp, Artificial Sequence
  HLA-A targeting gRNA
cgggagggaaacggcctctgtgg

SEQ ID NO: 958 - DNA, 23 bp, Artificial Sequence
  HLA-A targeting gRNA
ggagggaaacggcctctgtgggg

SEQ ID NO: 959 - DNA, 23 bp, Artificial Sequence
  HLA-A targeting gRNA
gggagggaaacggcctctgtggg

SEQ ID NO: 960 - DNA, 23 bp, Artificial Sequence
  HLA-A targeting gRNA
ggggcggggctcgggggaccggg

SEQ ID NO: 961 - DNA, 23 bp, Artificial Sequence
  HLA-A targeting gRNA
ggggtcccgcggcttcggggcgg

SEQ ID NO: 962 - DNA, 23 bp, Artificial Sequence
  HLA-A targeting gRNA
cgagatccgccccgaagccgcgg

SEQ ID NO: 963 - DNA, 23 bp, Artificial Sequence
  HLA-A targeting gRNA
cgcggcttcggggcggatctcgg

SEQ ID NO: 964 - DNA, 23 bp, Artificial Sequence
  HLA-A targeting gRNA
gagatccgccccgaagccgcggg

SEQ ID NO: 965 - DNA, 23 bp, Artificial Sequence
  HLA-A targeting gRNA
ttcggggcggatctcggacccgg

SEQ ID NO: 966 - DNA, 23 bp, Artificial Sequence
  HLA-A targeting gRNA
attgctggcctggttctctttgg

SEQ ID NO: 967 - DNA, 23 bp, Artificial Sequence
  HLA-A targeting gRNA
gcgtgggaagagggtcatggtgg

SEQ ID NO: 968 - DNA, 23 bp, Artificial Sequence
  HLA-A targeting gRNA
tcagcgtgggaagagggtcatgg

SEQ ID NO: 969 - DNA, 23 bp, Artificial Sequence
  HLA-A targeting gRNA
cacaggtcagcgtgggaagaggg

SEQ ID NO: 970 - DNA, 23 bp, Artificial Sequence
  HLA-A targeting gRNA
gcacaggtcagcgtgggaagagg

SEQ ID NO: 971 - DNA, 23 bp, Artificial Sequence
  HLA-A targeting gRNA
ccttgccgtcgtaggcgtactgg

SEQ ID NO: 972 - DNA, 23 bp, Artificial Sequence
  HLA-A targeting gRNA
aatcagtgtcgtcgcggtcgcgg

SEQ ID NO: 973 - DNA, 23 bp, Artificial Sequence
  HLA-A targeting gRNA
caggaagaaggaccctacatagg

SEQ ID NO: 974 - DNA, 23 bp, Artificial Sequence
  HLA-A targeting gRNA
ctatgtagggtccttcttcctgg

SEQ ID NO: 975 - DNA, 23 bp, Artificial Sequence
  HLA-A targeting gRNA
cttcctggatactcacgacgcgg

SEQ ID NO: 976 - DNA, 23 bp, Artificial Sequence
  HLA-A targeting gRNA
gtcgtgagtatccaggaagaagg

SEQ ID NO: 977 - DNA, 23 bp, Artificial Sequence
  HLA-A targeting gRNA
aagagggtcatggtggacatggg

SEQ ID NO: 978 - DNA, 23 bp, Artificial Sequence
  HLA-A targeting gRNA
agagggtcatggtggacatgggg

SEQ ID NO: 979 - DNA, 23 bp, Artificial Sequence
  HLA-A targeting gRNA
gagggtcatggtggacatggggg

SEQ ID NO: 980 - DNA, 23 bp, Artificial Sequence
  HLA-A targeting gRNA
acccgggaagccgcgccgggagg

SEQ ID NO: 981 - DNA, 23 bp, Artificial Sequence
  HLA-A targeting gRNA
cgggaagccgcgccgggaggagg

SEQ ID NO: 982 - DNA, 23 bp, Artificial Sequence
  HLA-A targeting gRNA
ctcctcccggcgcggcttcccgg

SEQ ID NO: 983 - DNA, 23 bp, Artificial Sequence
  HLA-A targeting gRNA
gggaagccgcgccgggaggaggg

SEQ ID NO: 984 - DNA, 23 bp, Artificial Sequence
  HLA-A targeting gRNA
tcctcccggcgcggcttcccggg

SEQ ID NO: 985 - DNA, 23 bp, Artificial Sequence
  HLA-A targeting gRNA
acacgaacacagacacatgcagg

SEQ ID NO: 986 - DNA, 23 bp, Artificial Sequence
  HLA-A targeting gRNA
gcatgtgtctgtgttcgtgtagg

SEQ ID NO: 987 - DNA, 23 bp, Artificial Sequence
  HLA-A targeting gRNA
aagaaggaccctacataggttgg

SEQ ID NO: 988 - DNA, 23 bp, Artificial Sequence
  HLA-A targeting gRNA
acctctcatcccccacggacggg

SEQ ID NO: 989 - DNA, 23 bp, Artificial Sequence
  HLA-A targeting gRNA
gacctctcatcccccacggacgg

SEQ ID NO: 990 - DNA, 23 bp, Artificial Sequence
  HLA-A targeting gRNA
gcccgtccgtgggggatgagagg

SEQ ID NO: 991 - DNA, 23 bp, Artificial Sequence
  HLA-A targeting gRNA
tcacgacctctcatcccccacgg

SEQ ID NO: 992 - DNA, 23 bp, Artificial Sequence
  HLA-A targeting gRNA
agaggtcgtgacctgcgccccgg

SEQ ID NO: 993 - DNA, 23 bp, Artificial Sequence
  HLA-A targeting gRNA
gaggtcgtgacctgcgccccggg

SEQ ID NO: 994 - DNA, 23 bp, Artificial Sequence
  HLA-A targeting gRNA
ttcacatccgtgtcccggcccgg

SEQ ID NO: 995 - DNA, 23 bp, Artificial Sequence
  HLA-A targeting gRNA
ctcagccactcctcgtccccagg

SEQ ID NO: 996 - DNA, 23 bp, Artificial Sequence
  HLA-A targeting gRNA
cgtgtaggcataatgtgaggagg

SEQ ID NO: 997 - DNA, 23 bp, Artificial Sequence
  HLA-A targeting gRNA
gttcgtgtaggcataatgtgagg

SEQ ID NO: 998 - DNA, 23 bp, Artificial Sequence
  HLA-A targeting gRNA
gaagagggtcatggtggacatgg

SEQ ID NO: 999 - DNA, 23 bp, Artificial Sequence
  HLA-A targeting gRNA
gagggagcacaggtcagcgtggg

SEQ ID NO: 1000 - DNA, 23 bp, Artificial Sequence
  HLA-A targeting gRNA
attcgtatctgtcacagtgaggg

SEQ ID NO: 1001 - DNA, 23 bp, Artificial Sequence
  HLA-A targeting gRNA
cgcatgctcaatacatccaatgg

SEQ ID NO: 1002 - DNA, 23 bp, Artificial Sequence
  HLA-A targeting gRNA
gctatggggtttctttccattgg

SEQ ID NO: 1003 - DNA, 23 bp, Artificial Sequence
  HLA-A targeting gRNA
ttcgtatctgtcacagtgagggg

SEQ ID NO: 1004 - DNA, 23 bp, Artificial Sequence
  HLA-A targeting gRNA
acacacacaggcagcagccttgg

SEQ ID NO: 1005 - DNA, 23 bp, Artificial Sequence
  HLA-A targeting gRNA
accttgattacagcggtgatggg

SEQ ID NO: 1006 - DNA, 23 bp, Artificial Sequence
  HLA-A targeting gRNA
agaaaggagtcagggccttaagg

SEQ ID NO: 1007 - DNA, 23 bp, Artificial Sequence
  HLA-A targeting gRNA
agcacctcagggtggcttcatgg

SEQ ID NO: 1008 - DNA, 23 bp, Artificial Sequence
  HLA-A targeting gRNA
atgaagccaccctgaggtgctgg

SEQ ID NO: 1009 - DNA, 23 bp, Artificial Sequence
  HLA-A targeting gRNA
atttatcaccttgattacagcgg

SEQ ID NO: 1010 - DNA, 23 bp, Artificial Sequence
  HLA-A targeting gRNA
cacacacaggcagcagccttggg

SEQ ID NO: 1011 - DNA, 23 bp, Artificial Sequence
  HLA-A targeting gRNA
caccttgattacagcggtgatgg

SEQ ID NO: 1012 - DNA, 23 bp, Artificial Sequence
  HLA-A targeting gRNA
caggaagagtcagatcattcagg

SEQ ID NO: 1013 - DNA, 23 bp, Artificial Sequence
  HLA-A targeting gRNA
ctcaggtggggaaggggtgaagg

SEQ ID NO: 1014 - DNA, 23 bp, Artificial Sequence
  HLA-A targeting gRNA
ctctttggagctgtgatcactgg

SEQ ID NO: 1015 - DNA, 23 bp, Artificial Sequence
  HLA-A targeting gRNA
ctgctgcctgtgtgtgtcaaagg

SEQ ID NO: 1016 - DNA, 23 bp, Artificial Sequence
  HLA-A targeting gRNA
ctgggtaggcccataattgtggg

SEQ ID NO: 1017 - DNA, 23 bp, Artificial Sequence
  HLA-A targeting gRNA
gaagagctcaggtggggaagggg

SEQ ID NO: 1018 - DNA, 23 bp, Artificial Sequence
  HLA-A targeting gRNA
gaagcaccacccacaattatggg

SEQ ID NO: 1019 - DNA, 23 bp, Artificial Sequence
  HLA-A targeting gRNA
ggaagcaccacccacaattatgg

SEQ ID NO: 1020 - DNA, 23 bp, Artificial Sequence
  HLA-A targeting gRNA
ggtaggcccataattgtgggtgg

SEQ ID NO: 1021 - DNA, 23 bp, Artificial Sequence
  HLA-A targeting gRNA
ggtggggaaggggtgaagggtgg

SEQ ID NO: 1022 - DNA, 23 bp, Artificial Sequence
  HLA-A targeting gRNA
ggtggtgcttcccagtaacgagg

SEQ ID NO: 1023 - DNA, 23 bp, Artificial Sequence
  HLA-A targeting gRNA
gtggggaaggggtgaagggtggg

SEQ ID NO: 1024 - DNA, 23 bp, Artificial Sequence
  HLA-A targeting gRNA
tcagggccttaaggtcctagagg

SEQ ID NO: 1025 - DNA, 23 bp, Artificial Sequence
  HLA-A targeting gRNA
tcaggtggggaaggggtgaaggg

SEQ ID NO: 1026 - DNA, 23 bp, Artificial Sequence
  HLA-A targeting gRNA
tcccatcaccgctgtaatcaagg

SEQ ID NO: 1027 - DNA, 23 bp, Artificial Sequence
  HLA-A targeting gRNA
tgctgcctgtgtgtgtcaaaggg

SEQ ID NO: 1028 - DNA, 23 bp, Artificial Sequence
  HLA-A targeting gRNA
tggttccctttgacacacacagg

SEQ ID NO: 1029 - DNA, 23 bp, Artificial Sequence
  HLA-A targeting gRNA
ttaaggccctgactcctttctgg

SEQ ID NO: 1030 - DNA, 23 bp, Artificial Sequence
  HLA-A targeting gRNA
cgtcgcagccatacatcctctgg

SEQ ID NO: 1031 - DNA, 23 bp, Artificial Sequence
  HLA-A targeting gRNA
aggatgtatggctgcgacgtggg

SEQ ID NO: 1032 - DNA, 23 bp, Artificial Sequence
  HLA-A targeting gRNA
gcgttttgggggcgtctgtcagg

SEQ ID NO: 1033 - DNA, 23 bp, Artificial Sequence
  HLA-A targeting gRNA
actcctttctggtatctcacagg

SEQ ID NO: 1034 - DNA, 23 bp, Artificial Sequence
  HLA-A targeting gRNA
gagataccagaaaggagtcaggg

SEQ ID NO: 1035 - DNA, 23 bp, Artificial Sequence
  HLA-A targeting gRNA
tgagataccagaaaggagtcagg

SEQ ID NO: 1036 - DNA, 23 bp, Artificial Sequence
  HLA-A targeting gRNA
tggtgagtcatatgcgttttggg

SEQ ID NO: 1037 - DNA, 23 bp, Artificial Sequence
  HLA-A targeting gRNA
gtggtgagtcatatgcgttttgg

SEQ ID NO: 1038 - DNA, 23 bp, Artificial Sequence
  HLA-A targeting gRNA
ggccgcctcccacttgtgcttgg

SEQ ID NO: 1039 - DNA, 23 bp, Artificial Sequence
  HLA-A targeting gRNA
accctacataggttgggagaggg

SEQ ID NO: 1040 - DNA, 23 bp, Artificial Sequence
  HLA-A targeting gRNA
agaaggaccctacataggttggg

SEQ ID NO: 1041 - DNA, 23 bp, Artificial Sequence
  HLA-A targeting gRNA
ctccctctcccaacctatgtagg

SEQ ID NO: 1042 - DNA, 23 bp, Artificial Sequence
  HLA-A targeting gRNA
gaccctacataggttgggagagg

SEQ ID NO: 1043 - DNA, 23 bp, Artificial Sequence
  HLA-A targeting gRNA
tccctctcccaacctatgtaggg

SEQ ID NO: 1044 - DNA, 23 bp, Artificial Sequence
  HLA-A targeting gRNA
cgcctcccacttgtgcttggtgg

SEQ ID NO: 1045 - DNA, 23 bp, Artificial Sequence
  HLA-A targeting gRNA
ggagggagcacaggtcagcgtgg

SEQ ID NO: 1046 - DNA, 23 bp, Artificial Sequence
  HLA-A targeting gRNA
aacaggaaagatgattggggagg

SEQ ID NO: 1047 - DNA, 23 bp, Artificial Sequence
  HLA-A targeting gRNA
acaggaaagatgattggggaggg

SEQ ID NO: 1048 - DNA, 23 bp, Artificial Sequence
  HLA-A targeting gRNA
gatgattggggagggagcacagg

SEQ ID NO: 1049 - DNA, 23 bp, Artificial Sequence
  HLA-A targeting gRNA
gtctccccgtcccaatactccgg

SEQ ID NO: 1050 - DNA, 23 bp, Artificial Sequence
  HLA-A targeting gRNA
cgggggaccgggctgaccgcggg

SEQ ID NO: 1051 - DNA, 23 bp, Artificial Sequence
  HLA-A targeting gRNA
gggggaccgggctgaccgcgggg

SEQ ID NO: 1052 - DNA, 23 bp, Artificial Sequence
  HLA-A targeting gRNA
tcgggggaccgggctgaccgcgg

SEQ ID NO: 1053 - DNA, 23 bp, Artificial Sequence
  HLA-A targeting gRNA
aggacccgggaagccgcgccggg

SEQ ID NO: 1054 - DNA, 23 bp, Artificial Sequence
  HLA-A targeting gRNA
caggacccgggaagccgcgccgg

SEQ ID NO: 1055 - DNA, 23 bp, Artificial Sequence
  HLA-A targeting gRNA
agcaggagggtccggagtattgg

SEQ ID NO: 1056 - DNA, 23 bp, Artificial Sequence
  HLA-A targeting gRNA
gcaggagggtccggagtattggg

SEQ ID NO: 1057 - DNA, 23 bp, Artificial Sequence
  HLA-A targeting gRNA
gggtccggagtattgggacgggg

SEQ ID NO: 1058 - DNA, 23 bp, Artificial Sequence
  HLA-A targeting gRNA
aaaaatccccccaggttggtcgg

SEQ ID NO: 1059 - DNA, 23 bp, Artificial Sequence
  HLA-A targeting gRNA
aaaatccccccaggttggtcggg

SEQ ID NO: 1060 - DNA, 23 bp, Artificial Sequence
  HLA-A targeting gRNA
aaatccccccaggttggtcgggg

SEQ ID NO: 1061 - DNA, 23 bp, Artificial Sequence
  HLA-A targeting gRNA
accgggctgaccgcggggtccgg

SEQ ID NO: 1062 - DNA, 23 bp, Artificial Sequence
  HLA-A targeting gRNA
aggttggtcggggcggggcgggg

SEQ ID NO: 1063 - DNA, 23 bp, Artificial Sequence
  HLA-A targeting gRNA
caggttggtcggggcggggcggg

SEQ ID NO: 1064 - DNA, 23 bp, Artificial Sequence
  HLA-A targeting gRNA
ccaggttggtcggggcggggcgg

SEQ ID NO: 1065 - DNA, 23 bp, Artificial Sequence
  HLA-A targeting gRNA
cccccaggttggtcggggcgggg

SEQ ID NO: 1066 - DNA, 23 bp, Artificial Sequence
  HLA-A targeting gRNA
ccccccaggttggtcggggcggg

SEQ ID NO: 1067 - DNA, 23 bp, Artificial Sequence
  HLA-A targeting gRNA
ccccgccccgaccaacctggggg

SEQ ID NO: 1068 - DNA, 23 bp, Artificial Sequence
  HLA-A targeting gRNA
cccgccccgaccaacctgggggg

SEQ ID NO: 1069 - DNA, 23 bp, Artificial Sequence
  HLA-A targeting gRNA
cccggaccccgcggtcagcccgg

SEQ ID NO: 1070 - DNA, 23 bp, Artificial Sequence
  HLA-A targeting gRNA
ccgccccgccccgaccaacctgg

SEQ ID NO: 1071 - DNA, 23 bp, Artificial Sequence
  HLA-A targeting gRNA
ccgggctgaccgcggggtccggg

SEQ ID NO: 1072 - DNA, 23 bp, Artificial Sequence
  HLA-A targeting gRNA
cgccccgccccgaccaacctggg

SEQ ID NO: 1073 - DNA, 23 bp, Artificial Sequence
  HLA-A targeting gRNA
gaccaacctggggggatttttgg

SEQ ID NO: 1074 - DNA, 23 bp, Artificial Sequence
  HLA-A targeting gRNA
gccccgccccgaccaacctgggg

SEQ ID NO: 1075 - DNA, 23 bp, Artificial Sequence
  HLA-A targeting gRNA
ggccaaaaatccccccaggttgg

SEQ ID NO: 1076 - DNA, 23 bp, Artificial Sequence
  HLA-A targeting gRNA
tccccccaggttggtcggggcgg

SEQ ID NO: 1077 - DNA, 23 bp, Artificial Sequence
  HLA-A targeting gRNA
tttaggccaaaaatccccccagg

SEQ ID NO: 1078 - DNA, 23 bp, Artificial Sequence
  HLA-A targeting gRNA
acagactcaccgagtggacctgg

SEQ ID NO: 1079 - DNA, 23 bp, Artificial Sequence
  HLA-A targeting gRNA
ctgaccgcggggtccgggccagg

SEQ ID NO: 1080 - DNA, 23 bp, Artificial Sequence
  HLA-A targeting gRNA
gctgcgacgtggggtcggactgg

SEQ ID NO: 1081 - DNA, 23 bp, Artificial Sequence
  HLA-A targeting gRNA
agaacctggcccggaccccgcgg

SEQ ID NO: 1082 - DNA, 23 bp, Artificial Sequence
  HLA-A targeting gRNA
ctgacctgagtggaggctgaagg

SEQ ID NO: 1083 - DNA, 23 bp, Artificial Sequence
  HLA-A targeting gRNA
gagtccttcagcctccactcagg

SEQ ID NO: 1084 - DNA, 23 bp, Artificial Sequence
  HLA-A targeting gRNA
gctgaaggactcagaagtgctgg

SEQ ID NO: 1085 - DNA, 23 bp, Artificial Sequence
  HLA-A targeting gRNA
cttcagcctccactcaggtcagg

SEQ ID NO: 1086 - DNA, 23 bp, Artificial Sequence
  HLA-A targeting gRNA
acacctcagccccacctctctgg

SEQ ID NO: 1087 - DNA, 23 bp, Artificial Sequence
  HLA-A targeting gRNA
cagccccacctctctggaacagg

SEQ ID NO: 1088 - DNA, 23 bp, Artificial Sequence
  HLA-A targeting gRNA
ctttcctgttccagagaggtggg

SEQ ID NO: 1089 - DNA, 23 bp, Artificial Sequence
  HLA-A targeting gRNA
gttccagagaggtggggctgagg

SEQ ID NO: 1090 - DNA, 23 bp, Artificial Sequence
  HLA-A targeting gRNA
tcatctttcctgttccagagagg

SEQ ID NO: 1091 - DNA, 23 bp, Artificial Sequence
  HLA-A targeting gRNA
tctggaacaggaaagatgattgg

SEQ ID NO: 1092 - DNA, 23 bp, Artificial Sequence
  HLA-A targeting gRNA
tctttcctgttccagagaggtgg

SEQ ID NO: 1093 - DNA, 23 bp, Artificial Sequence
  HLA-A targeting gRNA
tttcctgttccagagaggtgggg

SEQ ID NO: 1094 - DNA, 23 bp, Artificial Sequence
  HLA-A targeting gRNA
caggttctcacaccgtccagagg

SEQ ID NO: 1095 - DNA, 23 bp, Artificial Sequence
  HLA-A targeting gRNA
ctctggacggtgtgagaacctgg

SEQ ID NO: 1096 - DNA, 23 bp, Artificial Sequence
  HLA-A targeting gRNA
cggactggcgcttcctccgcggg

SEQ ID NO: 1097 - DNA, 23 bp, Artificial Sequence
  HLA-A targeting gRNA
cacaccgtccagaggatgtatgg

SEQ ID NO: 1098 - DNA, 23 bp, Artificial Sequence
  HLA-A targeting gRNA
gacggtgtgagaacctggcccgg

SEQ ID NO: 1099 - DNA, 23 bp, Artificial Sequence
  HLA-A targeting gRNA
ccatctctgtctcaacttcatgg

SEQ ID NO: 1100 - DNA, 23 bp, Artificial Sequence
  HLA-A targeting gRNA
ccatgaagttgagacagagatgg

SEQ ID NO: 1101 - DNA, 23 bp, Artificial Sequence
  HLA-A targeting gRNA
ctctcaactgctccgccacatgg

SEQ ID NO: 1102 - DNA, 23 bp, Artificial Sequence
  HLA-A targeting gRNA
ctggaacaggaaagatgattggg

SEQ ID NO: 1103 - DNA, 23 bp, Artificial Sequence
  HLA-A targeting gRNA
tggaacaggaaagatgattgggg

SEQ ID NO: 1104 - DNA, 23 bp, Artificial Sequence
  HLA-A targeting gRNA
gagagcctggggacgaggagtgg

SEQ ID NO: 1105 - DNA, 23 bp, Artificial Sequence
  HLA-A targeting gRNA
ggagtgagagcctggggacgagg

SEQ ID NO: 1106 - DNA, 23 bp, Artificial Sequence
  HLA-A targeting gRNA
acctcatggagtgagagcctggg

SEQ ID NO: 1107 - DNA, 23 bp, Artificial Sequence
  HLA-A targeting gRNA
ccagagcccccgagagtagcagg

SEQ ID NO: 1108 - DNA, 23 bp, Artificial Sequence
  HLA-A targeting gRNA
ccccaggctctcactccatgagg

SEQ ID NO: 1109 - DNA, 23 bp, Artificial Sequence
  HLA-A targeting gRNA
cctcatggagtgagagcctgggg

SEQ ID NO: 1110 - DNA, 23 bp, Artificial Sequence
  HLA-A targeting gRNA
cctgctactctcgggggctctgg

SEQ ID NO: 1111 - DNA, 23 bp, Artificial Sequence
  HLA-A targeting gRNA
ctctggccctgacccagacctgg

SEQ ID NO: 1112 - DNA, 23 bp, Artificial Sequence
  HLA-A targeting gRNA
tacctcatggagtgagagcctgg

SEQ ID NO: 1113 - DNA, 23 bp, Artificial Sequence
  HLA-A targeting gRNA
aagcaacgggcccgcctggcggg

SEQ ID NO: 1114 - DNA, 23 bp, Artificial Sequence
  HLA-A targeting gRNA
agcaacgggcccgcctggcgggg

SEQ ID NO: 1115 - DNA, 23 bp, Artificial Sequence
  HLA-A targeting gRNA
cccgttgcttctccccacagagg

SEQ ID NO: 1116 - DNA, 23 bp, Artificial Sequence
  HLA-A targeting gRNA
ccgggtcctgcgcccccgccagg

SEQ ID NO: 1117 - DNA, 23 bp, Artificial Sequence
  HLA-A targeting gRNA
cctctgtggggagaagcaacggg

SEQ ID NO: 1118 - DNA, 23 bp, Artificial Sequence
  HLA-A targeting gRNA
cctggcgggggcgcaggacccgg

SEQ ID NO: 1119 - DNA, 23 bp, Artificial Sequence
  HLA-A targeting gRNA
ctggcgggggcgcaggacccggg

SEQ ID NO: 1120 - DNA, 23 bp, Artificial Sequence
  HLA-A targeting gRNA
gaagcaacgggcccgcctggcgg

SEQ ID NO: 1121 - DNA, 23 bp, Artificial Sequence
  HLA-A targeting gRNA
gcaacgggcccgcctggcggggg

SEQ ID NO: 1122 - DNA, 23 bp, Artificial Sequence
  HLA-A targeting gRNA
gcctctgtggggagaagcaacgg

SEQ ID NO: 1123 - DNA, 23 bp, Artificial Sequence
  HLA-A targeting gRNA
ggagaagcaacgggcccgcctgg

SEQ ID NO: 1124 - DNA, 23 bp, Artificial Sequence
  HLA-A targeting gRNA
ggcccgcctggcgggggcgcagg

SEQ ID NO: 1125 - DNA, 23 bp, Artificial Sequence
  HLA-A targeting gRNA
ggtcctgcgcccccgccaggcgg

SEQ ID NO: 1126 - DNA, 23 bp, Artificial Sequence
  HLA-A targeting gRNA
gtcctgcgcccccgccaggcggg

SEQ ID NO: 1127 - DNA, 23 bp, Artificial Sequence
  HLA-A targeting gRNA
ccccttgcttctccccgcagagg

SEQ ID NO: 1128 - DNA, 23 bp, Artificial Sequence
  HLA-A targeting gRNA
cctctgcggggagaagcaagggg

SEQ ID NO: 1129 - DNA, 23 bp, Artificial Sequence
  HLA-A targeting gRNA
gcctctgcggggagaagcaaggg

SEQ ID NO: 1130 - DNA, 23 bp, Artificial Sequence
  HLA-A targeting gRNA
actagaattctccacggaatagg

SEQ ID NO: 1131 - DNA, 23 bp, Artificial Sequence
  HLA-A targeting gRNA
agaacctagcccggaccccgcgg

SEQ ID NO: 1132 - DNA, 23 bp, Artificial Sequence
  HLA-A targeting gRNA
agaattctagtccctgaagaggg

SEQ ID NO: 1133 - DNA, 23 bp, Artificial Sequence
  HLA-A targeting gRNA
cacaatatccaaaggacctcagg

SEQ ID NO: 1134 - DNA, 23 bp, Artificial Sequence
  HLA-A targeting gRNA
ctcccaaacacaatatccaaagg

SEQ ID NO: 1135 - DNA, 23 bp, Artificial Sequence
  HLA-A targeting gRNA
ctgaccgcggggtccgggctagg

SEQ ID NO: 1136 - DNA, 23 bp, Artificial Sequence
  HLA-A targeting gRNA
gacggtgtgagaacctagcccgg

SEQ ID NO: 1137 - DNA, 23 bp, Artificial Sequence
  HLA-A targeting gRNA
gagaattctagtccctgaagagg

SEQ ID NO: 1138 - DNA, 23 bp, Artificial Sequence
  HLA-A targeting gRNA
ggctgatgcctgaggtcctttgg

SEQ ID NO: 1139 - DNA, 23 bp, Artificial Sequence
  HLA-A targeting gRNA
ggtcctttggatattgtgtttgg

SEQ ID NO: 1140 - DNA, 23 bp, Artificial Sequence
  HLA-A targeting gRNA
gtcctttggatattgtgtttggg

SEQ ID NO: 1141 - DNA, 23 bp, Artificial Sequence
  HLA-A targeting gRNA
taggttctcacaccgtccagagg

SEQ ID NO: 1142 - DNA, 23 bp, Artificial Sequence
  HLA-A targeting gRNA
tcagggactagaattctccacgg

SEQ ID NO: 1143 - DNA, 23 bp, Artificial Sequence
  HLA-A targeting gRNA
acccagttctcactcccatcggg

SEQ ID NO: 1144 - DNA, 23 bp, Artificial Sequence
  HLA-A targeting gRNA
acccgatgggagtgagaactggg

SEQ ID NO: 1145 - DNA, 23 bp, Artificial Sequence
  HLA-A targeting gRNA
cacccgatgggagtgagaactgg

SEQ ID NO: 1146 - DNA, 23 bp, Artificial Sequence
  HLA-A targeting gRNA
cgggagggaaacggcctctgcgg

SEQ ID NO: 1147 - DNA, 23 bp, Artificial Sequence
  HLA-A targeting gRNA
ggagggaaacggcctctgcgggg

SEQ ID NO: 1148 - DNA, 23 bp, Artificial Sequence
  HLA-A targeting gRNA
ggcctctgcggggagaagcaagg

SEQ ID NO: 1149 - DNA, 23 bp, Artificial Sequence
  HLA-A targeting gRNA
gggagggaaacggcctctgcggg

SEQ ID NO: 1150 - DNA, 23 bp, Artificial Sequence
  HLA-A targeting gRNA
aagacccgggaagccgcgccggg

SEQ ID NO: 1151 - DNA, 23 bp, Artificial Sequence
  HLA-A targeting gRNA
aagcaaggggcccgcctggcggg

SEQ ID NO: 1152 - DNA, 23 bp, Artificial Sequence
  HLA-A targeting gRNA
agcaaggggcccgcctggcgggg

SEQ ID NO: 1153 - DNA, 23 bp, Artificial Sequence
  HLA-A targeting gRNA
caagacccgggaagccgcgccgg

SEQ ID NO: 1154 - DNA, 23 bp, Artificial Sequence
  HLA-A targeting gRNA
ccgggtcttgcgcccccgccagg

SEQ ID NO: 1155 - DNA, 23 bp, Artificial Sequence
  HLA-A targeting gRNA
cctggcgggggcgcaagacccgg

SEQ ID NO: 1156 - DNA, 23 bp, Artificial Sequence
  HLA-A targeting gRNA
ctggcgggggcgcaagacccggg

SEQ ID NO: 1157 - DNA, 23 bp, Artificial Sequence
  HLA-A targeting gRNA
gaagcaaggggcccgcctggcgg

SEQ ID NO: 1158 - DNA, 23 bp, Artificial Sequence
  HLA-A targeting gRNA
gcaaggggcccgcctggcggggg

SEQ ID NO: 1159 - DNA, 23 bp, Artificial Sequence
  HLA-A targeting gRNA
ggagaagcaaggggcccgcctgg

SEQ ID NO: 1160 - DNA, 23 bp, Artificial Sequence
  HLA-A targeting gRNA
ggtcttgcgcccccgccaggcgg

SEQ ID NO: 1161 - DNA, 23 bp, Artificial Sequence
  HLA-A targeting gRNA
gtcttgcgcccccgccaggcggg

SEQ ID NO: 1162 - DNA, 23 bp, Artificial Sequence
  HLA-A targeting gRNA
ctggaaacccgacacccgatggg

SEQ ID NO: 1163 - DNA, 23 bp, Artificial Sequence
  HLA-A targeting gRNA
gacccagttctcactcccatcgg

SEQ ID NO: 1164 - DNA, 23 bp, Artificial Sequence
  HLA-A targeting gRNA
tctcactcccatcgggtgtcggg

SEQ ID NO: 1165 - DNA, 23 bp, Artificial Sequence
  HLA-A targeting gRNA
tctggaaacccgacacccgatgg

SEQ ID NO: 1166 - DNA, 23 bp, Artificial Sequence
  HLA-A targeting gRNA
ttctcactcccatcgggtgtcgg

SEQ ID NO: 1167 - DNA, 23 bp, Artificial Sequence
  HLA-A targeting gRNA
agtacccgcgcagggtccccagg

SEQ ID NO: 1168 - DNA, 23 bp, Artificial Sequence
  HLA-A targeting gRNA
atttctttacatccgtgtcccgg

SEQ ID NO: 1169 - DNA, 23 bp, Artificial Sequence
  HLA-A targeting gRNA
cgggtactacaaccagagcgagg

SEQ ID NO: 1170 - DNA, 23 bp, Artificial Sequence
  HLA-A targeting gRNA
ctggttgtagtacccgcgcaggg

SEQ ID NO: 1171 - DNA, 23 bp, Artificial Sequence
  HLA-A targeting gRNA
ggatgtaaagaaatacctcatgg

SEQ ID NO: 1172 - DNA, 23 bp, Artificial Sequence
  HLA-A targeting gRNA
tctggttgtagtacccgcgcagg

SEQ ID NO: 1173 - DNA, 23 bp, Artificial Sequence
  HLA-A targeting gRNA
tggacctggggaccctgcgcggg

SEQ ID NO: 1174 - DNA, 23 bp, Artificial Sequence
  HLA-A targeting gRNA
tttacatccgtgtcccggcccgg

SEQ ID NO: 1175 - DNA, 23 bp, Artificial Sequence
  HLA-A targeting gRNA
aaaatctctgaaggaatgaccgg

SEQ ID NO: 1176 - DNA, 23 bp, Artificial Sequence
  HLA-A targeting gRNA
aaaggcacctgggcctctcccgg

SEQ ID NO: 1177 - DNA, 23 bp, Artificial Sequence
  HLA-A targeting gRNA
atatcggacccggagactgtggg

SEQ ID NO: 1178 - DNA, 23 bp, Artificial Sequence
  HLA-A targeting gRNA
cgatatccgccccgaagccgcgg

SEQ ID NO: 1179 - DNA, 23 bp, Artificial Sequence
  HLA-A targeting gRNA
cgcggcttcggggcggatatcgg

SEQ ID NO: 1180 - DNA, 23 bp, Artificial Sequence
  HLA-A targeting gRNA
aagagcgcaggtcgtctttcagg

SEQ ID NO: 1181 - DNA, 23 bp, Artificial Sequence
  HLA-A targeting gRNA
gatatccgccccgaagccgcggg

SEQ ID NO: 1182 - DNA, 23 bp, Artificial Sequence
  HLA-A targeting gRNA
gatatcggacccggagactgtgg

SEQ ID NO: 1183 - DNA, 23 bp, Artificial Sequence
  HLA-A targeting gRNA
aagcggggctcctcgcggccggg

SEQ ID NO: 1184 - DNA, 23 bp, Artificial Sequence
  HLA-A targeting gRNA
aaggcacctgggcctctcccggg

SEQ ID NO: 1185 - DNA, 23 bp, Artificial Sequence
  HLA-A targeting gRNA
ttcggggcggatatcggacccgg

SEQ ID NO: 1186 - DNA, 23 bp, Artificial Sequence
  HLA-A targeting gRNA
acaccacgcacgtgccctccagg

SEQ ID NO: 1187 - DNA, 23 bp, Artificial Sequence
  HLA-A targeting gRNA
acacggacctggcagcgggatgg

SEQ ID NO: 1188 - DNA, 23 bp, Artificial Sequence
  HLA-A targeting gRNA
caggttctcacaccctccagagg

SEQ ID NO: 1189 - DNA, 23 bp, Artificial Sequence
  HLA-A targeting gRNA
cggactggcgcttcctgcgcggg

SEQ ID NO: 1190 - DNA, 23 bp, Artificial Sequence
  HLA-A targeting gRNA
cgtactggtggtacccgcgcagg

SEQ ID NO: 1191 - DNA, 23 bp, Artificial Sequence
  HLA-A targeting gRNA
ctctggagggtgtgagaacctgg

SEQ ID NO: 1192 - DNA, 23 bp, Artificial Sequence
  HLA-A targeting gRNA
gagggtgtgagaacctggcccgg

SEQ ID NO: 1193 - DNA, 23 bp, Artificial Sequence
  HLA-A targeting gRNA
tcggactggcgcttcctgcgcgg

SEQ ID NO: 1194 - DNA, 23 bp, Artificial Sequence
  HLA-A targeting gRNA
acagcgacgccgcgagccggagg

SEQ ID NO: 1195 - DNA, 23 bp, Artificial Sequence
  HLA-A targeting gRNA
cgacgccgcgagccggaggatgg

SEQ ID NO: 1196 - DNA, 23 bp, Artificial Sequence
  HLA-A targeting gRNA
cgagccggaggatggagccgcgg

SEQ ID NO: 1197 - DNA, 23 bp, Artificial Sequence
  HLA-A targeting gRNA
cggctccatcctccggctcgcgg

SEQ ID NO: 1198 - DNA, 23 bp, Artificial Sequence
  HLA-A targeting gRNA
gagccggaggatggagccgcggg

SEQ ID NO: 1199 - DNA, 23 bp, Artificial Sequence
  HLA-A targeting gRNA
gcgcccgcggctccatcctccgg

SEQ ID NO: 1200 - DNA, 23 bp, Artificial Sequence
  HLA-A targeting gRNA
tcgacagcgacgccgcgagccgg

SEQ ID NO: 1201 - DNA, 23 bp, Artificial Sequence
  HLA-A targeting gRNA
cactcggtcagtctgtgagtggg

SEQ ID NO: 1202 - DNA, 23 bp, Artificial Sequence
  HLA-A targeting gRNA
ccactcacagactgaccgagtgg

SEQ ID NO: 1203 - DNA, 23 bp, Artificial Sequence
  HLA-A targeting gRNA
ccactcggtcagtctgtgagtgg

SEQ ID NO: 1204 - DNA, 23 bp, Artificial Sequence
  HLA-A targeting gRNA
acggacctggcagcgggatgggg

SEQ ID NO: 1205 - DNA, 23 bp, Artificial Sequence
  HLA-A targeting gRNA
acggctctgggaaaaggggaagg

SEQ ID NO: 1206 - DNA, 23 bp, Artificial Sequence
  HLA-A targeting gRNA
actagccgcgcagggtccccagg

SEQ ID NO: 1207 - DNA, 23 bp, Artificial Sequence
  HLA-A targeting gRNA
actcctttctgggatctcacagg

SEQ ID NO: 1208 - DNA, 23 bp, Artificial Sequence
  HLA-A targeting gRNA
agaccaggcctgccaggggatgg

SEQ ID NO: 1209 - DNA, 23 bp, Artificial Sequence
  HLA-A targeting gRNA
agaccctggcccggaccccgcgg

SEQ ID NO: 1210 - DNA, 23 bp, Artificial Sequence
  HLA-A targeting gRNA
acatagctccaaagagaactagg

SEQ ID NO: 1211 - DNA, 23 bp, Artificial Sequence
  HLA-A targeting gRNA
agctatgttcgctggagctgtgg

SEQ ID NO: 1212 - DNA, 23 bp, Artificial Sequence
  HLA-A targeting gRNA
cctcctccgcgggtaccagcagg

SEQ ID NO: 1213 - DNA, 23 bp, Artificial Sequence
  HLA-A targeting gRNA
cctgctggtacccgcggaggagg

SEQ ID NO: 1214 - DNA, 23 bp, Artificial Sequence
  HLA-A targeting gRNA
ctctttggagctatgttcgctgg

SEQ ID NO: 1215 - DNA, 23 bp, Artificial Sequence
  HLA-A targeting gRNA
tcatgtcttttacggaaagcagg

SEQ ID NO: 1216 - DNA, 23 bp, Artificial Sequence
  HLA-A targeting gRNA
tgggggtgtcatgtcttttacgg

SEQ ID NO: 1217 - DNA, 23 bp, Artificial Sequence
  HLA-A targeting gRNA
agagcgcaggtcgtctttcaggg

SEQ ID NO: 1218 - DNA, 23 bp, Artificial Sequence
  HLA-A targeting gRNA
agatcacacggacctggcagcgg

SEQ ID NO: 1219 - DNA, 23 bp, Artificial Sequence
  HLA-A targeting gRNA
agattctcccccagacgccgagg

SEQ ID NO: 1220 - DNA, 23 bp, Artificial Sequence
  HLA-A targeting gRNA
aggatgtgtggctgcgacgtggg

SEQ ID NO: 1221 - DNA, 23 bp, Artificial Sequence
  HLA-A targeting gRNA
aggatgtttggctgcgacgtggg

SEQ ID NO: 1222 - DNA, 23 bp, Artificial Sequence
  HLA-A targeting gRNA
aggcacctgggcctctcccgggg

SEQ ID NO: 1223 - DNA, 23 bp, Artificial Sequence
  HLA-A targeting gRNA
aggcataatgtgaggagggtggg

SEQ ID NO: 1224 - DNA, 23 bp, Artificial Sequence
  HLA-A targeting gRNA
aggcgaactggtggtacccgcgg

SEQ ID NO: 1225 - DNA, 23 bp, Artificial Sequence
  HLA-A targeting gRNA
aggcgtagtggtggtacccgcgg

SEQ ID NO: 1226 - DNA, 23 bp, Artificial Sequence
  HLA-A targeting gRNA
aggtccgtgtgatctccgcaggg

SEQ ID NO: 1227 - DNA, 23 bp, Artificial Sequence
  HLA-A targeting gRNA
atttctacacatccgtgtcccgg

SEQ ID NO: 1228 - DNA, 23 bp, Artificial Sequence
  HLA-A targeting gRNA
cacaccctccagatgatgtatgg

SEQ ID NO: 1229 - DNA, 23 bp, Artificial Sequence
  HLA-A targeting gRNA
caagtgggagacggcccatgagg

SEQ ID NO: 1230 - DNA, 23 bp, Artificial Sequence
  HLA-A targeting gRNA
cacaccgtccagaggatgtgtgg

SEQ ID NO: 1231 - DNA, 23 bp, Artificial Sequence
  HLA-A targeting gRNA
cacaccgtccagaggatgtttgg

SEQ ID NO: 1232 - DNA, 23 bp, Artificial Sequence
  HLA-A targeting gRNA
cacagcctcccacttctggaagg

SEQ ID NO: 1233 - DNA, 23 bp, Artificial Sequence
  HLA-A targeting gRNA
gtgggagacggcccatgaggcgg

SEQ ID NO: 1234 - DNA, 23 bp, Artificial Sequence
  HLA-A targeting gRNA
caccaagcacaagtgggagacgg

SEQ ID NO: 1235 - DNA, 23 bp, Artificial Sequence
  HLA-A targeting gRNA
aggtggggtgaagggatgaaggg

SEQ ID NO: 1236 - DNA, 23 bp, Artificial Sequence
  HLA-A targeting gRNA
caggtggggtgaagggatgaagg

SEQ ID NO: 1237 - DNA, 23 bp, Artificial Sequence
  HLA-A targeting gRNA
ggggtgaagggatgaagggtggg

SEQ ID NO: 1238 - DNA, 23 bp, Artificial Sequence
  HLA-A targeting gRNA
tggggtgaagggatgaagggtgg

SEQ ID NO: 1239 - DNA, 23 bp, Artificial Sequence
  HLA-A targeting gRNA
aggcgtcctgctggtacccgcgg

SEQ ID NO: 1240 - DNA, 23 bp, Artificial Sequence
  HLA-A targeting gRNA
cacggacctggcagcgggatggg

SEQ ID NO: 1241 - DNA, 23 bp, Artificial Sequence
  HLA-A targeting gRNA
taccagcaggacgcctacgacgg

SEQ ID NO: 1242 - DNA, 23 bp, Artificial Sequence
  HLA-A targeting gRNA
tgccgtcgtaggcgtcctgctgg

SEQ ID NO: 1243 - DNA, 23 bp, Artificial Sequence
  HLA-A targeting gRNA
agtattgggacgaggagacaggg

SEQ ID NO: 1244 - DNA, 23 bp, Artificial Sequence
  HLA-A targeting gRNA
cgaggagacagggaaagtgaagg

SEQ ID NO: 1245 - DNA, 23 bp, Artificial Sequence
  HLA-A targeting gRNA
cagggtctcacaccgtccagagg

SEQ ID NO: 1246 - DNA, 23 bp, Artificial Sequence
  HLA-A targeting gRNA
gagtattgggacgaggagacagg

SEQ ID NO: 1247 - DNA, 23 bp, Artificial Sequence
  HLA-A targeting gRNA
caggtccgtgtgatctccgcagg

SEQ ID NO: 1248 - DNA, 23 bp, Artificial Sequence
  HLA-A targeting gRNA
ggggccggagtattgggacgagg

SEQ ID NO: 1249 - DNA, 23 bp, Artificial Sequence
  HLA-A targeting gRNA
cggcccatgtggcggagcagtgg

SEQ ID NO: 1250 - DNA, 23 bp, Artificial Sequence
  HLA-A targeting gRNA
ctctccactgctccgccacatgg

SEQ ID NO: 1251 - DNA, 23 bp, Artificial Sequence
  HLA-A targeting gRNA
tctccactgctccgccacatggg

SEQ ID NO: 1252 - DNA, 23 bp, Artificial Sequence
  HLA-A targeting gRNA
cagttgaaagcctacctggaggg

SEQ ID NO: 1253 - DNA, 23 bp, Artificial Sequence
  HLA-A targeting gRNA
catgtttcctgatcccgcctggg

SEQ ID NO: 1254 - DNA, 23 bp, Artificial Sequence
  HLA-A targeting gRNA
ccaccacagcctcccacttctgg

SEQ ID NO: 1255 - DNA, 23 bp, Artificial Sequence
  HLA-A targeting gRNA
ccactacgcctacgacggcaagg

SEQ ID NO: 1256 - DNA, 23 bp, Artificial Sequence
  HLA-A targeting gRNA
ccagaagtgggaggctgtggtgg

SEQ ID NO: 1257 - DNA, 23 bp, Artificial Sequence
  HLA-A targeting gRNA
atctggagggtgtgagaacctgg

SEQ ID NO: 1258 - DNA, 23 bp, Artificial Sequence
  HLA-A targeting gRNA
ccagtcccccgagccccgcccgg

SEQ ID NO: 1259 - DNA, 23 bp, Artificial Sequence
  HLA-A targeting gRNA
ccgcccggccccgaccaacccgg

SEQ ID NO: 1260 - DNA, 23 bp, Artificial Sequence
  HLA-A targeting gRNA
ccgggcggggctcgggggactgg

SEQ ID NO: 1261 - DNA, 23 bp, Artificial Sequence
  HLA-A targeting gRNA
ccgggttggtcggggccgggcgg

SEQ ID NO: 1262 - DNA, 23 bp, Artificial Sequence
  HLA-A targeting gRNA
cgcccggccccgaccaacccggg

SEQ ID NO: 1263 - DNA, 23 bp, Artificial Sequence
  HLA-A targeting gRNA
cgggcggggctcgggggactggg

SEQ ID NO: 1264 - DNA, 23 bp, Artificial Sequence
  HLA-A targeting gRNA
cggggccgggcggggctcggggg

SEQ ID NO: 1265 - DNA, 23 bp, Artificial Sequence
  HLA-A targeting gRNA
cgggttggtcggggccgggcggg

SEQ ID NO: 1266 - DNA, 23 bp, Artificial Sequence
  HLA-A targeting gRNA
gggttggtcggggccgggcgggg

SEQ ID NO: 1267 - DNA, 23 bp, Artificial Sequence
  HLA-A targeting gRNA
ggtcggggccgggcggggctcgg

SEQ ID NO: 1268 - DNA, 23 bp, Artificial Sequence
  HLA-A targeting gRNA
gtcggggccgggcggggctcggg

SEQ ID NO: 1269 - DNA, 23 bp, Artificial Sequence
  HLA-A targeting gRNA
gtttggctgcgacgtggggtcgg

SEQ ID NO: 1270 - DNA, 23 bp, Artificial Sequence
  HLA-A targeting gRNA
tcggggccgggcggggctcgggg

SEQ ID NO: 1271 - DNA, 23 bp, Artificial Sequence
  HLA-A targeting gRNA
gtctcctcgtcccaatactccgg

SEQ ID NO: 1272 - DNA, 23 bp, Artificial Sequence
  HLA-A targeting gRNA
acaagaacacagacacatgcagg

SEQ ID NO: 1273 - DNA, 23 bp, Artificial Sequence
  HLA-A targeting gRNA
cttgtaggcataatgtgaggagg

SEQ ID NO: 1274 - DNA, 23 bp, Artificial Sequence
  HLA-A targeting gRNA
gcatgtgtctgtgttcttgtagg

SEQ ID NO: 1275 - DNA, 23 bp, Artificial Sequence
  HLA-A targeting gRNA
gttcttgtaggcataatgtgagg

SEQ ID NO: 1276 - DNA, 23 bp, Artificial Sequence
  HLA-A targeting gRNA
ccgccgcggtcaaagagcgcagg

SEQ ID NO: 1277 - DNA, 23 bp, Artificial Sequence
  HLA-A targeting gRNA
agagcgcaggtcctcgttcaagg

SEQ ID NO: 1278 - DNA, 23 bp, Artificial Sequence
  HLA-A targeting gRNA
aagagctcaggtggggtgaaggg

SEQ ID NO: 1279 - DNA, 23 bp, Artificial Sequence
  HLA-A targeting gRNA
aggtggaggaggaagagctcagg

SEQ ID NO: 1280 - DNA, 23 bp, Artificial Sequence
  HLA-A targeting gRNA
attgctggcctagttctctttgg

SEQ ID NO: 1281 - DNA, 23 bp, Artificial Sequence
  HLA-A targeting gRNA
ctgtggtcgctgctgtgaggtgg

SEQ ID NO: 1282 - DNA, 23 bp, Artificial Sequence
  HLA-A targeting gRNA
gaagagctcaggtggggtgaagg

SEQ ID NO: 1283 - DNA, 23 bp, Artificial Sequence
  HLA-A targeting gRNA
gaagcaccatccacaattatggg

SEQ ID NO: 1284 - DNA, 23 bp, Artificial Sequence
  HLA-A targeting gRNA
gagctgtggtcgctgctgtgagg

SEQ ID NO: 1285 - DNA, 23 bp, Artificial Sequence
  HLA-A targeting gRNA
ggaagcaccatccacaattatgg

SEQ ID NO: 1286 - DNA, 23 bp, Artificial Sequence
  HLA-A targeting gRNA
ggtaggcccataattgtggatgg

SEQ ID NO: 1287 - DNA, 23 bp, Artificial Sequence
  HLA-A targeting gRNA
tcgctgctgtgaggtggaggagg

SEQ ID NO: 1288 - DNA, 23 bp, Artificial Sequence
  HLA-A targeting gRNA
tggtcgctgctgtgaggtggagg

SEQ ID NO: 1289 - DNA, 23 bp, Artificial Sequence
  HLA-A targeting gRNA
ggattacatcgccttgaacgagg

SEQ ID NO: 1290 - DNA, 23 bp, Artificial Sequence
  HLA-A targeting gRNA
cctgcgctctttgaccgcggcgg

SEQ ID NO: 1291 - DNA, 23 bp, Artificial Sequence
  HLA-A targeting gRNA
actgggctgaccgtggggtcggg

SEQ ID NO: 1292 - DNA, 23 bp, Artificial Sequence
  HLA-A targeting gRNA
agaacctggccccgaccccacgg

SEQ ID NO: 1293 - DNA, 23 bp, Artificial Sequence
  HLA-A targeting gRNA
ccagtcccccgagccccgtccgg

SEQ ID NO: 1294 - DNA, 23 bp, Artificial Sequence
  HLA-A targeting gRNA
ccggacggggctcgggggactgg

SEQ ID NO: 1295 - DNA, 23 bp, Artificial Sequence
  HLA-A targeting gRNA
ccgggttggtcggggccggacgg

SEQ ID NO: 1296 - DNA, 23 bp, Artificial Sequence
  HLA-A targeting gRNA
ccgtccggccccgaccaacccgg

SEQ ID NO: 1297 - DNA, 23 bp, Artificial Sequence
  HLA-A targeting gRNA
cggacggggctcgggggactggg

SEQ ID NO: 1298 - DNA, 23 bp, Artificial Sequence
  HLA-A targeting gRNA
cggggccggacggggctcggggg

SEQ ID NO: 1299 - DNA, 23 bp, Artificial Sequence
  HLA-A targeting gRNA
cgggggactgggctgaccgtggg

SEQ ID NO: 1300 - DNA, 23 bp, Artificial Sequence
  HLA-A targeting gRNA
cgggttggtcggggccggacggg

SEQ ID NO: 1301 - DNA, 23 bp, Artificial Sequence
  HLA-A targeting gRNA
cgtccggccccgaccaacccggg

SEQ ID NO: 1302 - DNA, 23 bp, Artificial Sequence
  HLA-A targeting gRNA
ctgaccgtggggtcggggccagg

SEQ ID NO: 1303 - DNA, 23 bp, Artificial Sequence
  HLA-A targeting gRNA
ctgggctgaccgtggggtcgggg

SEQ ID NO: 1304 - DNA, 23 bp, Artificial Sequence
  HLA-A targeting gRNA
gactgggctgaccgtggggtcgg

SEQ ID NO: 1305 - DNA, 23 bp, Artificial Sequence
  HLA-A targeting gRNA
gggggactgggctgaccgtgggg

SEQ ID NO: 1306 - DNA, 23 bp, Artificial Sequence
  HLA-A targeting gRNA
gggttggtcggggccggacgggg

SEQ ID NO: 1307 - DNA, 23 bp, Artificial Sequence
  HLA-A targeting gRNA
ggtcggggccggacggggctcgg

SEQ ID NO: 1308 - DNA, 23 bp, Artificial Sequence
  HLA-A targeting gRNA
gtccggccccgaccaacccgggg

SEQ ID NO: 1309 - DNA, 23 bp, Artificial Sequence
  HLA-A targeting gRNA
gtcggggccggacggggctcggg

SEQ ID NO: 1310 - DNA, 23 bp, Artificial Sequence
  HLA-A targeting gRNA
tccggccccgaccaacccggggg

SEQ ID NO: 1311 - DNA, 23 bp, Artificial Sequence
  HLA-A targeting gRNA
tcggggccggacggggctcgggg

SEQ ID NO: 1312 - DNA, 23 bp, Artificial Sequence
  HLA-A targeting gRNA
tcgggggactgggctgaccgtgg

SEQ ID NO: 1313 - DNA, 23 bp, Artificial Sequence
  HLA-A targeting gRNA
gcgtcttgggggcgtctgtcagg

SEQ ID NO: 1314 - DNA, 23 bp, Artificial Sequence
  HLA-A targeting gRNA
ctctcggtcagtctgtgagtggg

SEQ ID NO: 1315 - DNA, 23 bp, Artificial Sequence
  HLA-A targeting gRNA
ccttgccgtcgtaggcgtagtgg

SEQ ID NO: 1316 - DNA, 23 bp, Artificial Sequence
  HLA-A targeting gRNA
tctctcggtcagtctgtgagtgg

SEQ ID NO: 1317 - DNA, 23 bp, Artificial Sequence
  HLA-A targeting gRNA
cgaactggtggtacccgcggagg

SEQ ID NO: 1318 - DNA, 23 bp, Artificial Sequence
  HLA-A targeting gRNA
cgacctgcgctcttggaccgcgg

SEQ ID NO: 1319 - DNA, 23 bp, Artificial Sequence
  HLA-A targeting gRNA
ctctcaactgctccgccacacgg

SEQ ID NO: 1320 - DNA, 23 bp, Artificial Sequence
  HLA-A targeting gRNA
tctcaactgctccgccacacggg

SEQ ID NO: 1321 - DNA, 23 bp, Artificial Sequence
  HLA-A targeting gRNA
cgatgaagcggggctcctcgcgg

SEQ ID NO: 1322 - DNA, 23 bp, Artificial Sequence
  HLA-A targeting gRNA
cgcagccatacatcatctggagg

SEQ ID NO: 1323 - DNA, 23 bp, Artificial Sequence
  HLA-A targeting gRNA
cgtcctgctggtacccgcggagg

SEQ ID NO: 1324 - DNA, 23 bp, Artificial Sequence
  HLA-A targeting gRNA
cggccatcctcggcgtctggggg

SEQ ID NO: 1325 - DNA, 23 bp, Artificial Sequence
  HLA-A targeting gRNA
cggcccatgaggcggagcagtgg

SEQ ID NO: 1326 - DNA, 23 bp, Artificial Sequence
  HLA-A targeting gRNA
cggctactgcaaccagagcgagg

SEQ ID NO: 1327 - DNA, 23 bp, Artificial Sequence
  HLA-A targeting gRNA
cggctagtacaaccagagcgagg

SEQ ID NO: 1328 - DNA, 23 bp, Artificial Sequence
  HLA-A targeting gRNA
cccccgggttggtcggggccggg

SEQ ID NO: 1329 - DNA, 23 bp, Artificial Sequence
  HLA-A targeting gRNA
cccggccccgaccaacccggggg

SEQ ID NO: 1330 - DNA, 23 bp, Artificial Sequence
  HLA-A targeting gRNA
gcccggccccgaccaacccgggg

SEQ ID NO: 1331 - DNA, 23 bp, Artificial Sequence
  HLA-A targeting gRNA
atgatgtatggctgcgacgtggg

SEQ ID NO: 1332 - DNA, 23 bp, Artificial Sequence
  HLA-A targeting gRNA
cgtcgcagccatacatcatctgg

SEQ ID NO: 1333 - DNA, 23 bp, Artificial Sequence
  HLA-A targeting gRNA
gatgatgtatggctgcgacgtgg

SEQ ID NO: 1334 - DNA, 23 bp, Artificial Sequence
  HLA-A targeting gRNA
caagctccgtgtcctgggtctgg

SEQ ID NO: 1335 - DNA, 23 bp, Artificial Sequence
  HLA-A targeting gRNA
acacggagcttgtggagaccagg

SEQ ID NO: 1336 - DNA, 23 bp, Artificial Sequence
  HLA-A targeting gRNA
cttgtggagaccaggcctgcagg

SEQ ID NO: 1337 - DNA, 23 bp, Artificial Sequence
  HLA-A targeting gRNA
tgtggagaccaggcctgcagggg

SEQ ID NO: 1338 - DNA, 23 bp, Artificial Sequence
  HLA-A targeting gRNA
ttgtggagaccaggcctgcaggg

SEQ ID NO: 1339 - DNA, 23 bp, Artificial Sequence
  HLA-A targeting gRNA
cgtagtggtggtacccgcggagg

SEQ ID NO: 1340 - DNA, 23 bp, Artificial Sequence
  HLA-A targeting gRNA
cgtcgcagccaaacatcctctgg

SEQ ID NO: 1341 - DNA, 23 bp, Artificial Sequence
  HLA-A targeting gRNA
cgtcgcagccacacatcctctgg

SEQ ID NO: 1342 - DNA, 23 bp, Artificial Sequence
  HLA-A targeting gRNA
cgtctcccacttgtgcttggtgg

SEQ ID NO: 1343 - DNA, 23 bp, Artificial Sequence
  HLA-A targeting gRNA
cgtggagaccaggcctgccaggg

SEQ ID NO: 1344 - DNA, 23 bp, Artificial Sequence
  HLA-A targeting gRNA
cgtgtcccggcccggccgcgagg

SEQ ID NO: 1345 - DNA, 23 bp, Artificial Sequence
  HLA-A targeting gRNA
ctaagctgccatgtccgccgcgg

SEQ ID NO: 1346 - DNA, 23 bp, Artificial Sequence
  HLA-A targeting gRNA
ctccacaagctccgtgtcctggg

SEQ ID NO: 1347 - DNA, 23 bp, Artificial Sequence
  HLA-A targeting gRNA
gacccaggacacggagcttgtgg

SEQ ID NO: 1348 - DNA, 23 bp, Artificial Sequence
  HLA-A targeting gRNA
tctccacaagctccgtgtcctgg

SEQ ID NO: 1349 - DNA, 23 bp, Artificial Sequence
  HLA-A targeting gRNA
ctcagccactcctggtccccagg

SEQ ID NO: 1350 - DNA, 23 bp, Artificial Sequence
  HLA-A targeting gRNA
ggtgagtcatatgcgtcttgggg

SEQ ID NO: 1351 - DNA, 23 bp, Artificial Sequence
  HLA-A targeting gRNA
gtgagtcatatgcgtcttggggg

SEQ ID NO: 1352 - DNA, 23 bp, Artificial Sequence
  HLA-A targeting gRNA
ctcagggtggcttcatggtcagg

SEQ ID NO: 1353 - DNA, 23 bp, Artificial Sequence
  HLA-A targeting gRNA
gtggtgagtcatatgcgtcttgg

SEQ ID NO: 1354 - DNA, 23 bp, Artificial Sequence
  HLA-A targeting gRNA
tggtgagtcatatgcgtcttggg

SEQ ID NO: 1355 - DNA, 23 bp, Artificial Sequence
  HLA-A targeting gRNA
cacaccatccagatgatgtatgg

SEQ ID NO: 1356 - DNA, 23 bp, Artificial Sequence
  HLA-A targeting gRNA
gcagccatacatcatctggatgg

SEQ ID NO: 1357 - DNA, 23 bp, Artificial Sequence
  HLA-A targeting gRNA
ctcgcggccgggccgggacacgg

SEQ ID NO: 1358 - DNA, 23 bp, Artificial Sequence
  HLA-A targeting gRNA
tgatgtatggctgcgacgtgggg

SEQ ID NO: 1359 - DNA, 23 bp, Artificial Sequence
  HLA-A targeting gRNA
ctctccactgctccgcctcatgg

SEQ ID NO: 1360 - DNA, 23 bp, Artificial Sequence
  HLA-A targeting gRNA
acacacaccggcagcagccttgg

SEQ ID NO: 1361 - DNA, 23 bp, Artificial Sequence
  HLA-A targeting gRNA
agtggacgcagctgtgctatggg

SEQ ID NO: 1362 - DNA, 23 bp, Artificial Sequence
  HLA-A targeting gRNA
atattgtgtttgggagcccgtgg

SEQ ID NO: 1363 - DNA, 23 bp, Artificial Sequence
  HLA-A targeting gRNA
atgtctctcacagcttgtaaagg

SEQ ID NO: 1364 - DNA, 23 bp, Artificial Sequence
  HLA-A targeting gRNA
attgtgtttgggagcccgtgggg

SEQ ID NO: 1365 - DNA, 23 bp, Artificial Sequence
  HLA-A targeting gRNA
cacacaccggcagcagccttggg

SEQ ID NO: 1366 - DNA, 23 bp, Artificial Sequence
  HLA-A targeting gRNA
cacagacgcccacttctggaagg

SEQ ID NO: 1367 - DNA, 23 bp, Artificial Sequence
  HLA-A targeting gRNA
caggaagagtcagaacattcagg

SEQ ID NO: 1368 - DNA, 23 bp, Artificial Sequence
  HLA-A targeting gRNA
cagtggacgcagctgtgctatgg

SEQ ID NO: 1369 - DNA, 23 bp, Artificial Sequence
  HLA-A targeting gRNA
ctctggacggtgtgagaccctgg

SEQ ID NO: 1370 - DNA, 23 bp, Artificial Sequence
  HLA-A targeting gRNA
ccaccacagacgcccacttctgg

SEQ ID NO: 1371 - DNA, 23 bp, Artificial Sequence
  HLA-A targeting gRNA
ccacgctgtctctgaccatgagg

SEQ ID NO: 1372 - DNA, 23 bp, Artificial Sequence
  HLA-A targeting gRNA
ccagaagtgggcgtctgtggtgg

SEQ ID NO: 1373 - DNA, 23 bp, Artificial Sequence
  HLA-A targeting gRNA
cctcatggtcagagacagcgtgg

SEQ ID NO: 1374 - DNA, 23 bp, Artificial Sequence
  HLA-A targeting gRNA
ctcttggaccgcggcggacacgg

SEQ ID NO: 1375 - DNA, 23 bp, Artificial Sequence
  HLA-A targeting gRNA
ctgctgccggtgtgtgtcaaagg

SEQ ID NO: 1376 - DNA, 23 bp, Artificial Sequence
  HLA-A targeting gRNA
ctctttgaccgcggcggacatgg

SEQ ID NO: 1377 - DNA, 23 bp, Artificial Sequence
  HLA-A targeting gRNA
cttccagaagtgggcgtctgtgg

SEQ ID NO: 1378 - DNA, 23 bp, Artificial Sequence
  HLA-A targeting gRNA
gagagacatatcagagccctggg

SEQ ID NO: 1379 - DNA, 23 bp, Artificial Sequence
  HLA-A targeting gRNA
gatggtgcttcccagtaacgagg

SEQ ID NO: 1380 - DNA, 23 bp, Artificial Sequence
  HLA-A targeting gRNA
gcactgtcactgcctggggtagg

SEQ ID NO: 1381 - DNA, 23 bp, Artificial Sequence
  HLA-A targeting gRNA
gcgtctgtggtggtgccttctgg

SEQ ID NO: 1382 - DNA, 23 bp, Artificial Sequence
  HLA-A targeting gRNA
ggggtgggtgagctcccccacgg

SEQ ID NO: 1383 - DNA, 23 bp, Artificial Sequence
  HLA-A targeting gRNA
gggtgggtgagctcccccacggg

SEQ ID NO: 1384 - DNA, 23 bp, Artificial Sequence
  HLA-A targeting gRNA
ggtaggacaaaaacagaacctgg

SEQ ID NO: 1385 - DNA, 23 bp, Artificial Sequence
  HLA-A targeting gRNA
gtggacgcagctgtgctatgggg

SEQ ID NO: 1386 - DNA, 23 bp, Artificial Sequence
  HLA-A targeting gRNA
tattgtgtttgggagcccgtggg

SEQ ID NO: 1387 - DNA, 23 bp, Artificial Sequence
  HLA-A targeting gRNA
tgagagacatatcagagccctgg

SEQ ID NO: 1388 - DNA, 23 bp, Artificial Sequence
  HLA-A targeting gRNA
tgctgccggtgtgtgtcaaaggg

SEQ ID NO: 1389 - DNA, 23 bp, Artificial Sequence
  HLA-A targeting gRNA
ttctgtttttgtcctaccccagg

SEQ ID NO: 1390 - DNA, 23 bp, Artificial Sequence
  HLA-A targeting gRNA
ttgtgtttgggagcccgtggggg

SEQ ID NO: 1391 - DNA, 23 bp, Artificial Sequence
  HLA-A targeting gRNA
ctgagctgccgtgtccgccgcgg

SEQ ID NO: 1392 - DNA, 23 bp, Artificial Sequence
  HLA-A targeting gRNA
tggttccctttgacacacaccgg

SEQ ID NO: 1393 - DNA, 23 bp, Artificial Sequence
  HLA-A targeting gRNA
ctgcagacccaggcgggatcagg

SEQ ID NO: 1394 - DNA, 23 bp, Artificial Sequence
  HLA-A targeting gRNA
ctgcggagatcacacggacctgg

SEQ ID NO: 1395 - DNA, 23 bp, Artificial Sequence
  HLA-A targeting gRNA
ccgcggaggaagcgcccgtccgg

SEQ ID NO: 1396 - DNA, 23 bp, Artificial Sequence
  HLA-A targeting gRNA
ccggacgggcgcttcctccgcgg

SEQ ID NO: 1397 - DNA, 23 bp, Artificial Sequence
  HLA-A targeting gRNA
ctgggaaaaggggaaggtgaggg

SEQ ID NO: 1398 - DNA, 23 bp, Artificial Sequence
  HLA-A targeting gRNA
ctggttgcagtagccgcgcaggg

SEQ ID NO: 1399 - DNA, 23 bp, Artificial Sequence
  HLA-A targeting gRNA
ctggttgtactagccgcgcaggg

SEQ ID NO: 1400 - DNA, 23 bp, Artificial Sequence
  HLA-A targeting gRNA
cttagaccaccaagcacaagtgg

SEQ ID NO: 1401 - DNA, 23 bp, Artificial Sequence
  HLA-A targeting gRNA
cttcatggtcagagacagcttgg

SEQ ID NO: 1402 - DNA, 23 bp, Artificial Sequence
  HLA-A targeting gRNA
cttcatggtcagggacagcgtgg

SEQ ID NO: 1403 - DNA, 23 bp, Artificial Sequence
  HLA-A targeting gRNA
cttccagaagtgggaggctgtgg

SEQ ID NO: 1404 - DNA, 23 bp, Artificial Sequence
  HLA-A targeting gRNA
ctttcaactgctccgccacatgg

SEQ ID NO: 1405 - DNA, 23 bp, Artificial Sequence
  HLA-A targeting gRNA
gaaaccgggtaaaggcacctggg

SEQ ID NO: 1406 - DNA, 23 bp, Artificial Sequence
  HLA-A targeting gRNA
gaagacggctctgggaaaagggg

SEQ ID NO: 1407 - DNA, 23 bp, Artificial Sequence
  HLA-A targeting gRNA
gaagcggggctcctcgcggccgg

SEQ ID NO: 1408 - DNA, 23 bp, Artificial Sequence
  HLA-A targeting gRNA
acagactgaccgagtggacctgg

SEQ ID NO: 1409 - DNA, 23 bp, Artificial Sequence
  HLA-A targeting gRNA
cagactgaccgagtggacctggg

SEQ ID NO: 1410 - DNA, 23 bp, Artificial Sequence
  HLA-A targeting gRNA
gacggtgtgagaccctggcccgg

SEQ ID NO: 1411 - DNA, 23 bp, Artificial Sequence
  HLA-A targeting gRNA
agactgaccgagtggacctgggg

SEQ ID NO: 1412 - DNA, 23 bp, Artificial Sequence
  HLA-A targeting gRNA
gagagcctggggaccaggagtgg

SEQ ID NO: 1413 - DNA, 23 bp, Artificial Sequence
  HLA-A targeting gRNA
cacaccctccagaggatgtatgg

SEQ ID NO: 1414 - DNA, 23 bp, Artificial Sequence
  HLA-A targeting gRNA
gcagccatacatcctctggaggg

SEQ ID NO: 1415 - DNA, 23 bp, Artificial Sequence
  HLA-A targeting gRNA
gagatcccagaaaggagtcaggg

SEQ ID NO: 1416 - DNA, 23 bp, Artificial Sequence
  HLA-A targeting gRNA
taccggcaggacgcctacgacgg

SEQ ID NO: 1417 - DNA, 23 bp, Artificial Sequence
  HLA-A targeting gRNA
tgccgtcgtaggcgtcctgccgg

SEQ ID NO: 1418 - DNA, 23 bp, Artificial Sequence
  HLA-A targeting gRNA
gaggatgtgtggctgcgacgtgg

SEQ ID NO: 1419 - DNA, 23 bp, Artificial Sequence
  HLA-A targeting gRNA
gaggatgtttggctgcgacgtgg

SEQ ID NO: 1420 - DNA, 23 bp, Artificial Sequence
  HLA-A targeting gRNA
gaggcccaggtgcctttacccgg

SEQ ID NO: 1421 - DNA, 23 bp, Artificial Sequence
  HLA-A targeting gRNA
gaggctgtggtggtgccttctgg

SEQ ID NO: 1422 - DNA, 23 bp, Artificial Sequence
  HLA-A targeting gRNA
aggcgtcctgccggtacccgcgg

SEQ ID NO: 1423 - DNA, 23 bp, Artificial Sequence
  HLA-A targeting gRNA
cgcagccatacatcctctggagg

SEQ ID NO: 1424 - DNA, 23 bp, Artificial Sequence
  HLA-A targeting gRNA
cgtcctgccggtacccgcggagg

SEQ ID NO: 1425 - DNA, 23 bp, Artificial Sequence
  HLA-A targeting gRNA
ccccccgggttggtcggggccgg

SEQ ID NO: 1426 - DNA, 23 bp, Artificial Sequence
  HLA-A targeting gRNA
ccggccccgaccaacccgggggg

SEQ ID NO: 1427 - DNA, 23 bp, Artificial Sequence
  HLA-A targeting gRNA
cttcctccgcgggtaccggcagg

SEQ ID NO: 1428 - DNA, 23 bp, Artificial Sequence
  HLA-A targeting gRNA
gatcacacggacctggcagcggg

SEQ ID NO: 1429 - DNA, 23 bp, Artificial Sequence
  HLA-A targeting gRNA
ggcgcttcctccgcgggtaccgg

SEQ ID NO: 1430 - DNA, 23 bp, Artificial Sequence
  HLA-A targeting gRNA
actgggctgaccgcggggtcggg

SEQ ID NO: 1431 - DNA, 23 bp, Artificial Sequence
  HLA-A targeting gRNA
gactgggctgaccgcggggtcgg

SEQ ID NO: 1432 - DNA, 23 bp, Artificial Sequence
  HLA-A targeting gRNA
ctgggctgaccgcggggtcgggg

SEQ ID NO: 1433 - DNA, 23 bp, Artificial Sequence
  HLA-A targeting gRNA
gcagccaaacatcctctggacgg

SEQ ID NO: 1434 - DNA, 23 bp, Artificial Sequence
  HLA-A targeting gRNA
gcagccacacatcctctggacgg

SEQ ID NO: 1435 - DNA, 23 bp, Artificial Sequence
  HLA-A targeting gRNA
gcagccatacatcatctggaggg

SEQ ID NO: 1436 - DNA, 23 bp, Artificial Sequence
  HLA-A targeting gRNA
gcagttgaaagcctacctggagg

SEQ ID NO: 1437 - DNA, 23 bp, Artificial Sequence
  HLA-A targeting gRNA
agaacctggccccgaccccgcgg

SEQ ID NO: 1438 - DNA, 23 bp, Artificial Sequence
  HLA-A targeting gRNA
ctgaccgcggggtcggggccagg

SEQ ID NO: 1439 - DNA, 23 bp, Artificial Sequence
  HLA-A targeting gRNA
gcgcgatccgcaggctctctcgg

SEQ ID NO: 1440 - DNA, 23 bp, Artificial Sequence
  HLA-A targeting gRNA
accttgattacggcggtgatggg

SEQ ID NO: 1441 - DNA, 23 bp, Artificial Sequence
  HLA-A targeting gRNA
atttatcaccttgattacggcgg

SEQ ID NO: 1442 - DNA, 23 bp, Artificial Sequence
  HLA-A targeting gRNA
caccttgattacggcggtgatgg

SEQ ID NO: 1443 - DNA, 23 bp, Artificial Sequence
  HLA-A targeting gRNA
tcccatcaccgccgtaatcaagg

SEQ ID NO: 1444 - DNA, 23 bp, Artificial Sequence
  HLA-A targeting gRNA
agtagcggagcgcgatccgcagg

SEQ ID NO: 1445 - DNA, 23 bp, Artificial Sequence
  HLA-A targeting gRNA
agactgaccgagagagcctgcgg

SEQ ID NO: 1446 - DNA, 23 bp, Artificial Sequence
  HLA-A targeting gRNA
cagatttatcaccttgattacgg

SEQ ID NO: 1447 - DNA, 23 bp, Artificial Sequence
  HLA-A targeting gRNA
gcaggacgcctacgacggcaagg

SEQ ID NO: 1448 - DNA, 23 bp, Artificial Sequence
  HLA-A targeting gRNA
gctgcgacgtggggtcggacggg

SEQ ID NO: 1449 - DNA, 23 bp, Artificial Sequence
  HLA-A targeting gRNA
ggctgcgacgtggggtcggacgg

SEQ ID NO: 1450 - DNA, 23 bp, Artificial Sequence
  HLA-A targeting gRNA
ggaagacggctctgggaaaaggg

SEQ ID NO: 1451 - DNA, 23 bp, Artificial Sequence
  HLA-A targeting gRNA
tcggacgggcgcttcctccgcgg

SEQ ID NO: 1452 - DNA, 23 bp, Artificial Sequence
  HLA-A targeting gRNA
ggaaggttccatcccctggcagg

SEQ ID NO: 1453 - DNA, 23 bp, Artificial Sequence
  HLA-A targeting gRNA
ggacctgcgctctttgaccgcgg

SEQ ID NO: 1454 - DNA, 23 bp, Artificial Sequence
  HLA-A targeting gRNA
atttctacacctccgtgtcccgg

SEQ ID NO: 1455 - DNA, 23 bp, Artificial Sequence
  HLA-A targeting gRNA
tacacctccgtgtcccggcccgg

SEQ ID NO: 1456 - DNA, 23 bp, Artificial Sequence
  HLA-A targeting gRNA
ggagcagttgaaagcctacctgg

SEQ ID NO: 1457 - DNA, 23 bp, Artificial Sequence
  HLA-A targeting gRNA
ttggaccgcggcggacatggcgg

SEQ ID NO: 1458 - DNA, 23 bp, Artificial Sequence
  HLA-A targeting gRNA
ggggtcccgcggcttcggggtgg

SEQ ID NO: 1459 - DNA, 23 bp, Artificial Sequence
  HLA-A targeting gRNA
ctgagccgccatgtccgccgcgg

SEQ ID NO: 1460 - DNA, 23 bp, Artificial Sequence
  HLA-A targeting gRNA
atctggatggtgtgagaacctgg

SEQ ID NO: 1461 - DNA, 23 bp, Artificial Sequence
  HLA-A targeting gRNA
cacgggcccaaggctgctgccgg

SEQ ID NO: 1462 - DNA, 23 bp, Artificial Sequence
  HLA-A targeting gRNA
ggagtgagagcctggggaccagg

SEQ ID NO: 1463 - DNA, 23 bp, Artificial Sequence
  HLA-A targeting gRNA
tgaacgaggacctgcgctcttgg

SEQ ID NO: 1464 - DNA, 23 bp, Artificial Sequence
  HLA-A targeting gRNA
ggaggtgtagaaatacctcatgg

SEQ ID NO: 1465 - DNA, 23 bp, Artificial Sequence
  HLA-A targeting gRNA
ggatgtgtagaaatacctcatgg

SEQ ID NO: 1466 - DNA, 23 bp, Artificial Sequence
  HLA-A targeting gRNA
ggatgtgtggctgcgacgtgggg

SEQ ID NO: 1467 - DNA, 23 bp, Artificial Sequence
  HLA-A targeting gRNA
ggatgtttggctgcgacgtgggg

SEQ ID NO: 1468 - DNA, 23 bp, Artificial Sequence
  HLA-A targeting gRNA
ggcataatgtgaggagggtgggg

SEQ ID NO: 1469 - DNA, 23 bp, Artificial Sequence
  HLA-A targeting gRNA
agatggggtaaggagggagatgg

SEQ ID NO: 1470 - DNA, 23 bp, Artificial Sequence
  HLA-A targeting gRNA
atggggtaaggagggagatgggg

SEQ ID NO: 1471 - DNA, 23 bp, Artificial Sequence
  HLA-A targeting gRNA
gatggggtaaggagggagatggg

SEQ ID NO: 1472 - DNA, 23 bp, Artificial Sequence
  HLA-A targeting gRNA
tggggtaaggagggagatggggg

SEQ ID NO: 1473 - DNA, 23 bp, Artificial Sequence
  HLA-A targeting gRNA
ggccgtctcccacttgtgcttgg

SEQ ID NO: 1474 - DNA, 23 bp, Artificial Sequence
  HLA-A targeting gRNA
gggaagacggctctgggaaaagg

SEQ ID NO: 1475 - DNA, 23 bp, Artificial Sequence
  HLA-A targeting gRNA
cgagatccaccccgaagccgcgg

SEQ ID NO: 1476 - DNA, 23 bp, Artificial Sequence
  HLA-A targeting gRNA
cgcggcttcggggtggatctcgg

SEQ ID NO: 1477 - DNA, 23 bp, Artificial Sequence
  HLA-A targeting gRNA
gagatccaccccgaagccgcggg

SEQ ID NO: 1478 - DNA, 23 bp, Artificial Sequence
  HLA-A targeting gRNA
ttcggggtggatctcggacccgg

SEQ ID NO: 1479 - DNA, 23 bp, Artificial Sequence
  HLA-A targeting gRNA
gggcgggtctcagccactcctgg

SEQ ID NO: 1480 - DNA, 23 bp, Artificial Sequence
  HLA-A targeting gRNA
gggctcctcgcggccgggccggg

SEQ ID NO: 1481 - DNA, 23 bp, Artificial Sequence
  HLA-A targeting gRNA
gctatggggtttctttgcattgg

SEQ ID NO: 1482 - DNA, 23 bp, Artificial Sequence
  HLA-A targeting gRNA
ggggctcctcgcggccgggccgg

SEQ ID NO: 1483 - DNA, 23 bp, Artificial Sequence
  HLA-A targeting gRNA
gcagaccctcatgctgcacatgg

SEQ ID NO: 1484 - DNA, 23 bp, Artificial Sequence
  HLA-A targeting gRNA
gtatggctgcgacgtggggccgg

SEQ ID NO: 1485 - DNA, 23 bp, Artificial Sequence
  HLA-A targeting gRNA
gagtccctcagcctccactcagg

SEQ ID NO: 1486 - DNA, 23 bp, Artificial Sequence
  HLA-A targeting gRNA
gctgagggactcagaagtgctgg

SEQ ID NO: 1487 - DNA, 23 bp, Artificial Sequence
  HLA-A targeting gRNA
gggtgaagggatgaagggtgggg

SEQ ID NO: 1488 - DNA, 23 bp, Artificial Sequence
  HLA-A targeting gRNA
cctcagcctccactcaggtcagg

SEQ ID NO: 1489 - DNA, 23 bp, Artificial Sequence
  HLA-A targeting gRNA
cctgacctgagtggaggctgagg

SEQ ID NO: 1490 - DNA, 23 bp, Artificial Sequence
  HLA-A targeting gRNA
ctgacctgagtggaggctgaggg

SEQ ID NO: 1491 - DNA, 23 bp, Artificial Sequence
  HLA-A targeting gRNA
ccagttcgcctacgacggcaagg

SEQ ID NO: 1492 - DNA, 23 bp, Artificial Sequence
  HLA-A targeting gRNA
ccttgccgtcgtaggcgaactgg

SEQ ID NO: 1493 - DNA, 23 bp, Artificial Sequence
  HLA-A targeting gRNA
gagataccagaaaggagccaggg

SEQ ID NO: 1494 - DNA, 23 bp, Artificial Sequence
  HLA-A targeting gRNA
gctcctttctggtatctcacagg

SEQ ID NO: 1495 - DNA, 23 bp, Artificial Sequence
  HLA-A targeting gRNA
tgagataccagaaaggagccagg

SEQ ID NO: 1496 - DNA, 23 bp, Artificial Sequence
  HLA-A targeting gRNA
agaaaggagccagggccttaagg

SEQ ID NO: 1497 - DNA, 23 bp, Artificial Sequence
  HLA-A targeting gRNA
ccagggccttaaggtcctagagg

SEQ ID NO: 1498 - DNA, 23 bp, Artificial Sequence
  HLA-A targeting gRNA
cctctaggaccttaaggccctgg

SEQ ID NO: 1499 - DNA, 23 bp, Artificial Sequence
  HLA-A targeting gRNA
ttaaggccctggctcctttctgg

SEQ ID NO: 1500 - DNA, 23 bp, Artificial Sequence
  HLA-A targeting gRNA
cagtggagagcctacctggaggg

SEQ ID NO: 1501 - DNA, 23 bp, Artificial Sequence
  HLA-A targeting gRNA
gcagtggagagcctacctggagg

SEQ ID NO: 1502 - DNA, 23 bp, Artificial Sequence
  HLA-A targeting gRNA
ggagcagtggagagcctacctgg

SEQ ID NO: 1503 - DNA, 23 bp, Artificial Sequence
  HLA-A targeting gRNA
gcggccgggccgggacacggagg

SEQ ID NO: 1504 - DNA, 23 bp, Artificial Sequence
  HLA-A targeting gRNA
ggtgtggctccgcagatacctgg

SEQ ID NO: 1505 - DNA, 23 bp, Artificial Sequence
  HLA-A targeting gRNA
ggttagtcatatgcgttttgggg

SEQ ID NO: 1506 - DNA, 23 bp, Artificial Sequence
  HLA-A targeting gRNA
aaaaatccccccgggttggtcgg

SEQ ID NO: 1507 - DNA, 23 bp, Artificial Sequence
  HLA-A targeting gRNA
aaaatccccccgggttggtcggg

SEQ ID NO: 1508 - DNA, 23 bp, Artificial Sequence
  HLA-A targeting gRNA
gtattcgagggatcgtcttccgg

SEQ ID NO: 1509 - DNA, 23 bp, Artificial Sequence
  HLA-A targeting gRNA
aaatccccccgggttggtcgggg

SEQ ID NO: 1510 - DNA, 23 bp, Artificial Sequence
  HLA-A targeting gRNA
gaccaacccggggggatttttgg

SEQ ID NO: 1511 - DNA, 23 bp, Artificial Sequence
  HLA-A targeting gRNA
ggccaaaaatccccccgggttgg

SEQ ID NO: 1512 - DNA, 23 bp, Artificial Sequence
  HLA-A targeting gRNA
gtttaggccaaaaatccccccgg

SEQ ID NO: 1513 - DNA, 23 bp, Artificial Sequence
  HLA-A targeting gRNA
tttaggccaaaaatccccccggg

SEQ ID NO: 1514 - DNA, 23 bp, Artificial Sequence
  HLA-A targeting gRNA
cggacgggcgcttcctccgcggg

SEQ ID NO: 1515 - DNA, 23 bp, Artificial Sequence
  HLA-A targeting gRNA
cgggggactgggctgaccgcggg

SEQ ID NO: 1516 - DNA, 23 bp, Artificial Sequence
  HLA-A targeting gRNA
tcgggggactgggctgaccgcgg

SEQ ID NO: 1517 - DNA, 23 bp, Artificial Sequence
  HLA-A targeting gRNA
tggagggcctgtgcgtggagtgg

SEQ ID NO: 1518 - DNA, 23 bp, Artificial Sequence
  HLA-A targeting gRNA
tgcggagccactccacgcacagg

SEQ ID NO: 1519 - DNA, 23 bp, Artificial Sequence
  HLA-A targeting gRNA
ccgctactacaaccagagcgagg

SEQ ID NO: 1520 - DNA, 23 bp, Artificial Sequence
  HLA-A targeting gRNA
cctcgctctggttgtagtagcgg

SEQ ID NO: 1521 - DNA, 23 bp, Artificial Sequence
  HLA-A targeting gRNA
gtggagaccaggcctgccagggg

SEQ ID NO: 1522 - DNA, 23 bp, Artificial Sequence
  HLA-A targeting gRNA
gtggttagtcatatgcgttttgg

SEQ ID NO: 1523 - DNA, 23 bp, Artificial Sequence
  HLA-A targeting gRNA
gtgtaggcataatgtgaggaggg

SEQ ID NO: 1524 - DNA, 23 bp, Artificial Sequence
  HLA-A targeting gRNA
gtgtgactgcagacccaggcggg

SEQ ID NO: 1525 - DNA, 23 bp, Artificial Sequence
  HLA-A targeting gRNA
gtgtggctgcgacgtggggtcgg

SEQ ID NO: 1526 - DNA, 23 bp, Artificial Sequence
  HLA-A targeting gRNA
gttagtcatatgcgttttggggg

SEQ ID NO: 1527 - DNA, 23 bp, Artificial Sequence
  HLA-A targeting gRNA
gttccatcccctggcaggcctgg

SEQ ID NO: 1528 - DNA, 23 bp, Artificial Sequence
  HLA-A targeting gRNA
gggggactgggctgaccgcgggg

SEQ ID NO: 1529 - DNA, 23 bp, Artificial Sequence
  HLA-A targeting gRNA
taaggccctgactcctttctggg

SEQ ID NO: 1530 - DNA, 23 bp, Artificial Sequence
  HLA-A targeting gRNA
tacacatccgtgtcccggcccgg

SEQ ID NO: 1531 - DNA, 23 bp, Artificial Sequence
  HLA-A targeting gRNA
taccaccactacgcctacgacgg

SEQ ID NO: 1532 - DNA, 23 bp, Artificial Sequence
  HLA-A targeting gRNA
taccaccagttcgcctacgacgg

SEQ ID NO: 1533 - DNA, 23 bp, Artificial Sequence
  HLA-A targeting gRNA
tactgcaaccagagcgaggccgg

SEQ ID NO: 1534 - DNA, 23 bp, Artificial Sequence
  HLA-A targeting gRNA
taggcataatgtgaggagggtgg

SEQ ID NO: 1535 - DNA, 23 bp, Artificial Sequence
  HLA-A targeting gRNA
tagtacaaccagagcgaggccgg

SEQ ID NO: 1536 - DNA, 23 bp, Artificial Sequence
  HLA-A targeting gRNA
actccacgcacaggccctccagg

SEQ ID NO: 1537 - DNA, 23 bp, Artificial Sequence
  HLA-A targeting gRNA
tcagggtggcttcatggtcaggg

SEQ ID NO: 1538 - DNA, 23 bp, Artificial Sequence
  HLA-A targeting gRNA
cacgcacaggccctccaggtagg

SEQ ID NO: 1539 - DNA, 23 bp, Artificial Sequence
  HLA-A targeting gRNA
ctacctggagggcctgtgcgtgg

SEQ ID NO: 1540 - DNA, 23 bp, Artificial Sequence
  HLA-A targeting gRNA
tcatgtttcctgatcccgcctgg

SEQ ID NO: 1541 - DNA, 23 bp, Artificial Sequence
  HLA-A targeting gRNA
tcgtggagaccaggcctgccagg

SEQ ID NO: 1542 - DNA, 23 bp, Artificial Sequence
  HLA-A targeting gRNA
tctaccctgcggagatcacacgg

SEQ ID NO: 1543 - DNA, 23 bp, Artificial Sequence
  HLA-A targeting gRNA
tctccactgctccgcctcatggg

SEQ ID NO: 1544 - DNA, 23 bp, Artificial Sequence
  HLA-A targeting gRNA
tctcccccagacgccgaggatgg

SEQ ID NO: 1545 - DNA, 23 bp, Artificial Sequence
  HLA-A targeting gRNA
tctgggaaaaggggaaggtgagg

SEQ ID NO: 1546 - DNA, 23 bp, Artificial Sequence
  HLA-A targeting gRNA
tctggttgcagtagccgcgcagg

SEQ ID NO: 1547 - DNA, 23 bp, Artificial Sequence
  HLA-A targeting gRNA
tctggttgtactagccgcgcagg

SEQ ID NO: 1548 - DNA, 23 bp, Artificial Sequence
  HLA-A targeting gRNA
tgaaaccgggtaaaggcacctgg

SEQ ID NO: 1549 - DNA, 23 bp, Artificial Sequence
  HLA-A targeting gRNA
tgaaagacgacctgcgctcttgg

SEQ ID NO: 1550 - DNA, 23 bp, Artificial Sequence
  HLA-A targeting gRNA
tgaccgcggggtccgggccaggg

SEQ ID NO: 1551 - DNA, 23 bp, Artificial Sequence
  HLA-A targeting gRNA
tgagatcccagaaaggagtcagg

SEQ ID NO: 1552 - DNA, 23 bp, Artificial Sequence
  HLA-A targeting gRNA
gtgggaggcggcccgtgtggcgg

SEQ ID NO: 1553 - DNA, 23 bp, Artificial Sequence
  HLA-A targeting gRNA
cgccgtggatagagcaggagggg

SEQ ID NO: 1554 - DNA, 23 bp, Artificial Sequence
  HLA-A targeting gRNA
caagtgggaggcggcccgtgtgg

SEQ ID NO: 1555 - DNA, 23 bp, Artificial Sequence
  HLA-A targeting gRNA
ggcccctcctgctctatccacgg

SEQ ID NO: 1556 - DNA, 23 bp, Artificial Sequence
  HLA-A targeting gRNA
gtggatagagcaggaggggccgg

SEQ ID NO: 1557 - DNA, 23 bp, Artificial Sequence
  HLA-A targeting gRNA
tgccgtcgtaggcgaactggtgg

SEQ ID NO: 1558 - DNA, 23 bp, Artificial Sequence
  HLA-A targeting gRNA
tgccgtcgtaggcgtagtggtgg

SEQ ID NO: 1559 - DNA, 23 bp, Artificial Sequence
  HLA-A targeting gRNA
gctgcgacgtggggccggacggg

SEQ ID NO: 1560 - DNA, 23 bp, Artificial Sequence
  HLA-A targeting gRNA
ggctgcgacgtggggccggacgg

SEQ ID NO: 1561 - DNA, 23 bp, Artificial Sequence
  HLA-A targeting gRNA
tggaaccttccagaagtgggagg

SEQ ID NO: 1562 - DNA, 23 bp, Artificial Sequence
  HLA-A targeting gRNA
ccgcggaggaggcgcccgtccgg

SEQ ID NO: 1563 - DNA, 23 bp, Artificial Sequence
  HLA-A targeting gRNA
ccggacgggcgcctcctccgcgg

SEQ ID NO: 1564 - DNA, 23 bp, Artificial Sequence
  HLA-A targeting gRNA
cggacgggcgcctcctccgcggg

SEQ ID NO: 1565 - DNA, 23 bp, Artificial Sequence
  HLA-A targeting gRNA
tggagggcacgtgcgtggtgtgg

SEQ ID NO: 1566 - DNA, 23 bp, Artificial Sequence
  HLA-A targeting gRNA
tgggaaaaggggaaggtgagggg

SEQ ID NO: 1567 - DNA, 23 bp, Artificial Sequence
  HLA-A targeting gRNA
tggttagtcatatgcgttttggg

SEQ ID NO: 1568 - DNA, 23 bp, Artificial Sequence
  HLA-A targeting gRNA
cacccagcgcaagtgggaggcgg

SEQ ID NO: 1569 - DNA, 23 bp, Artificial Sequence
  HLA-A targeting gRNA
tgtcctgtgagatcccagaaagg

SEQ ID NO: 1570 - DNA, 23 bp, Artificial Sequence
  HLA-A targeting gRNA
gggccgcctcccacttgcgctgg

SEQ ID NO: 1571 - DNA, 23 bp, Artificial Sequence
  HLA-A targeting gRNA
ggccgcctcccacttgcgctggg

SEQ ID NO: 1572 - DNA, 23 bp, Artificial Sequence
  HLA-A targeting gRNA
gatcacccagcgcaagtgggagg

SEQ ID NO: 1573 - DNA, 23 bp, Artificial Sequence
  HLA-A targeting gRNA
ctcagatcacccagcgcaagtgg

SEQ ID NO: 1574 - DNA, 23 bp, Artificial Sequence
  HLA-A targeting gRNA
tcagatcacccagcgcaagtggg

SEQ ID NO: 1575 - DNA, 23 bp, Artificial Sequence
  HLA-A targeting gRNA
tgtgtgactgcagacccaggcgg

SEQ ID NO: 1576 - DNA, 23 bp, Artificial Sequence
  HLA-A targeting gRNA
ttagaccaccaagcacaagtggg

SEQ ID NO: 1577 - DNA, 23 bp, Artificial Sequence
  HLA-A targeting gRNA
agcacctcagggtggcctcatgg

SEQ ID NO: 1578 - DNA, 23 bp, Artificial Sequence
  HLA-A targeting gRNA
atgaggccaccctgaggtgctgg

SEQ ID NO: 1579 - DNA, 23 bp, Artificial Sequence
  HLA-A targeting gRNA
ctgaccatgaggccaccctgagg

SEQ ID NO: 1580 - DNA, 23 bp, Artificial Sequence
  HLA-A targeting gRNA
tgaggccaccctgaggtgctggg

SEQ ID NO: 1581 - DNA, 23 bp, Artificial Sequence
  HLA-A targeting gRNA
ttctggaaggttccatcccctgg

SEQ ID NO: 1582 - DNA, 23 bp, Artificial Sequence
  HLA-A targeting gRNA
agcaggaggggccggagtattgg

SEQ ID NO: 1583 - DNA, 23 bp, Artificial Sequence
  HLA-A targeting gRNA
gcaggaggggccggagtattggg

SEQ ID NO: 1584 - DNA, 23 bp, Artificial Sequence
  HLA-A targeting gRNA
ttggtgagtcatatgcgttttgg

SEQ ID NO: 1585 - DNA, 23 bp, Artificial Sequence
  HLA-A targeting gRNA
tttcaactgctccgccacatggg

SEQ ID NO: 1586 - DNA, 23 bp, Artificial Sequence
  HLA-A targeting gRNA
acggccattctcggcgtctgggg

SEQ ID NO: 1587 - DNA, 23 bp, Artificial Sequence
  HLA-A targeting gRNA
aaaaatccccccgggtgggtcgg

SEQ ID NO: 1588 - DNA, 23 bp, Artificial Sequence
  HLA-A targeting gRNA
gacgccgagaatggccgtcatgg

SEQ ID NO: 1589 - DNA, 23 bp, Artificial Sequence
  HLA-A targeting gRNA
aaaaatccccctggttggtcggg

SEQ ID NO: 1590 - DNA, 23 bp, Artificial Sequence
  HLA-A targeting gRNA
aaaaatctctgaaggaatgacgg

SEQ ID NO: 1591 - DNA, 23 bp, Artificial Sequence
  HLA-A targeting gRNA
gacggccattctcggcgtctggg

SEQ ID NO: 1592 - DNA, 23 bp, Artificial Sequence
  HLA-A targeting gRNA
gagcccctcagcctccactcagg

SEQ ID NO: 1593 - DNA, 23 bp, Artificial Sequence
  HLA-A targeting gRNA
gctgaggggctcagaagtgctgg

SEQ ID NO: 1594 - DNA, 23 bp, Artificial Sequence
  HLA-A targeting gRNA
aaaaggagggagttactctcagg

SEQ ID NO: 1595 - DNA, 23 bp, Artificial Sequence
  HLA-A targeting gRNA
ggcgccatgacggccattctcgg

SEQ ID NO: 1596 - DNA, 23 bp, Artificial Sequence
  HLA-A targeting gRNA
aaaatccccccgggtgggtcggg

SEQ ID NO: 1597 - DNA, 23 bp, Artificial Sequence
  HLA-A targeting gRNA
tgacctgagtggaggctgagggg

SEQ ID NO: 1598 - DNA, 23 bp, Artificial Sequence
  HLA-A targeting gRNA
aaaatccccctggttggtcgggg

SEQ ID NO: 1599 - DNA, 23 bp, Artificial Sequence
  HLA-A targeting gRNA
tgacggccattctcggcgtctgg

SEQ ID NO: 1600 - DNA, 23 bp, Artificial Sequence
  HLA-A targeting gRNA
ttctccccagacgccgagaatgg

SEQ ID NO: 1601 - DNA, 23 bp, Artificial Sequence
  HLA-A targeting gRNA
aaaccgggttaaaggcgcctggg

SEQ ID NO: 1602 - DNA, 23 bp, Artificial Sequence
  HLA-A targeting gRNA
aaatccccccgggtgggtcgggg

SEQ ID NO: 1603 - DNA, 23 bp, Artificial Sequence
  HLA-A targeting gRNA
acctctggtcctgacctgagtgg

SEQ ID NO: 1604 - DNA, 23 bp, Artificial Sequence
  HLA-A targeting gRNA
aaatgtgtgaatgcagacccagg

SEQ ID NO: 1605 - DNA, 23 bp, Artificial Sequence
  HLA-A targeting gRNA
aggcctcatcccccacggacggg

SEQ ID NO: 1606 - DNA, 23 bp, Artificial Sequence
  HLA-A targeting gRNA
aggtcgctgttccctcctcaggg

SEQ ID NO: 1607 - DNA, 23 bp, Artificial Sequence
  HLA-A targeting gRNA
atgaggcctgcgccccgggccgg

SEQ ID NO: 1608 - DNA, 23 bp, Artificial Sequence
  HLA-A targeting gRNA
cagcctggacacagacacctggg

SEQ ID NO: 1609 - DNA, 23 bp, Artificial Sequence
  HLA-A targeting gRNA
caggcctcatcccccacggacgg

SEQ ID NO: 1610 - DNA, 23 bp, Artificial Sequence
  HLA-A targeting gRNA
catcgggagaatctgagtcccgg

SEQ ID NO: 1611 - DNA, 23 bp, Artificial Sequence
  HLA-A targeting gRNA
cattactggaaacttctctgagg

SEQ ID NO: 1612 - DNA, 23 bp, Artificial Sequence
  HLA-A targeting gRNA
ccagcctggacacagacacctgg

SEQ ID NO: 1613 - DNA, 23 bp, Artificial Sequence
  HLA-A targeting gRNA
aagaagagctcaggtggagaagg

SEQ ID NO: 1614 - DNA, 23 bp, Artificial Sequence
  HLA-A targeting gRNA
ccaggtgtctgtgtccaggctgg

SEQ ID NO: 1615 - DNA, 23 bp, Artificial Sequence
  HLA-A targeting gRNA
cgggactcagattctcccgatgg

SEQ ID NO: 1616 - DNA, 23 bp, Artificial Sequence
  HLA-A targeting gRNA
cgggagaatctgagtcccggtgg

SEQ ID NO: 1617 - DNA, 23 bp, Artificial Sequence
  HLA-A targeting gRNA
cggggcgccatgacggccatcgg

SEQ ID NO: 1618 - DNA, 23 bp, Artificial Sequence
  HLA-A targeting gRNA
ctcaggcagtgacagtgcccagg

SEQ ID NO: 1619 - DNA, 23 bp, Artificial Sequence
  HLA-A targeting gRNA
ctgggcactgtcactgcctgagg

SEQ ID NO: 1620 - DNA, 23 bp, Artificial Sequence
  HLA-A targeting gRNA
gaggagggaacagcgacctctgg

SEQ ID NO: 1621 - DNA, 23 bp, Artificial Sequence
  HLA-A targeting gRNA
gaggcctgcgccccgggccgggg

SEQ ID NO: 1622 - DNA, 23 bp, Artificial Sequence
  HLA-A targeting gRNA
gaggtcgctgttccctcctcagg

SEQ ID NO: 1623 - DNA, 23 bp, Artificial Sequence
  HLA-A targeting gRNA
aagcagggctccccgcggccggg

SEQ ID NO: 1624 - DNA, 23 bp, Artificial Sequence
  HLA-A targeting gRNA
gattctcccgatggccgtcatgg

SEQ ID NO: 1625 - DNA, 23 bp, Artificial Sequence
  HLA-A targeting gRNA
ggcgcaggcctcatcccccacgg

SEQ ID NO: 1626 - DNA, 23 bp, Artificial Sequence
  HLA-A targeting gRNA
gggacactccagcatgcatgtgg

SEQ ID NO: 1627 - DNA, 23 bp, Artificial Sequence
  HLA-A targeting gRNA
aagcggggttccccgcggccggg

SEQ ID NO: 1628 - DNA, 23 bp, Artificial Sequence
  HLA-A targeting gRNA
ggggatgaggcctgcgccccggg

SEQ ID NO: 1629 - DNA, 23 bp, Artificial Sequence
  HLA-A targeting gRNA
aagcgtcctgctggtacccgcgg

SEQ ID NO: 1630 - DNA, 23 bp, Artificial Sequence
  HLA-A targeting gRNA
aaggaaacgctgcagcgcacggg

SEQ ID NO: 1631 - DNA, 23 bp, Artificial Sequence
  HLA-A targeting gRNA
aaggagacgctgcagcgcacagg

SEQ ID NO: 1632 - DNA, 23 bp, Artificial Sequence
  HLA-A targeting gRNA
ggggcgccatgacggccatcggg

SEQ ID NO: 1633 - DNA, 23 bp, Artificial Sequence
  HLA-A targeting gRNA
aaggagacgctgcagcgcactgg

SEQ ID NO: 1634 - DNA, 23 bp, Artificial Sequence
  HLA-A targeting gRNA
gggggatgaggcctgcgccccgg

SEQ ID NO: 1635 - DNA, 23 bp, Artificial Sequence
  HLA-A targeting gRNA
aaggagatgctgcagcgcacggg

SEQ ID NO: 1636 - DNA, 23 bp, Artificial Sequence
  HLA-A targeting gRNA
aaggatgcccacgatggggatgg

SEQ ID NO: 1637 - DNA, 23 bp, Artificial Sequence
  HLA-A targeting gRNA
ggtctgcagtcacacattactgg

SEQ ID NO: 1638 - DNA, 23 bp, Artificial Sequence
  HLA-A targeting gRNA
ggtgagacccctcactgtgatgg

SEQ ID NO: 1639 - DNA, 23 bp, Artificial Sequence
  HLA-A targeting gRNA
taatgtgtgactgcagacccagg

SEQ ID NO: 1640 - DNA, 23 bp, Artificial Sequence
  HLA-A targeting gRNA
aagtcgctgttccctcgtcaggg

SEQ ID NO: 1641 - DNA, 23 bp, Artificial Sequence
  HLA-A targeting gRNA
aagtcgctgttccctctgcaggg

SEQ ID NO: 1642 - DNA, 23 bp, Artificial Sequence
  HLA-A targeting gRNA
tatcccaggtgtctgtgtccagg

SEQ ID NO: 1643 - DNA, 23 bp, Artificial Sequence
  HLA-A targeting gRNA
tcaggcagtgacagtgcccaggg

SEQ ID NO: 1644 - DNA, 23 bp, Artificial Sequence
  HLA-A targeting gRNA
aatcatgggcccacccagcctgg

SEQ ID NO: 1645 - DNA, 23 bp, Artificial Sequence
  HLA-A targeting gRNA
tccactcaggtcaggaccagagg

SEQ ID NO: 1646 - DNA, 23 bp, Artificial Sequence
  HLA-A targeting gRNA
tctgtgtccaggctggtgtctgg

SEQ ID NO: 1647 - DNA, 23 bp, Artificial Sequence
  HLA-A targeting gRNA
tgaggcctgcgccccgggccggg

SEQ ID NO: 1648 - DNA, 23 bp, Artificial Sequence
  HLA-A targeting gRNA
aatctgtccttcattgtaacagg

SEQ ID NO: 1649 - DNA, 23 bp, Artificial Sequence
  HLA-A targeting gRNA
ttctgtttttgttctacctcagg

SEQ ID NO: 1650 - DNA, 23 bp, Artificial Sequence
  HLA-A targeting gRNA
aatcttctattccctgacgaggg

SEQ ID NO: 1651 - DNA, 23 bp, Artificial Sequence
  HLA-A targeting gRNA
aatcttctattccctgcagaggg

SEQ ID NO: 1652 - DNA, 23 bp, Artificial Sequence
  HLA-A targeting gRNA
aatgatgcccacaatggggatgg

SEQ ID NO: 1653 - DNA, 23 bp, Artificial Sequence
  HLA-A targeting gRNA
agaacctggcctcgaccccgcgg

SEQ ID NO: 1654 - DNA, 23 bp, Artificial Sequence
  HLA-A targeting gRNA
aatgatgcccacgatgtggacgg

SEQ ID NO: 1655 - DNA, 23 bp, Artificial Sequence
  HLA-A targeting gRNA
ctgaccgcggggtcgaggccagg

SEQ ID NO: 1656 - DNA, 23 bp, Artificial Sequence
  HLA-A targeting gRNA
aatggccacatgcgtgctggtgg

SEQ ID NO: 1657 - DNA, 23 bp, Artificial Sequence
  HLA-A targeting gRNA
ctgggctgaccgcggggtcgagg

SEQ ID NO: 1658 - DNA, 23 bp, Artificial Sequence
  HLA-A targeting gRNA
aatgtgccctgtctcattcctgg

SEQ ID NO: 1659 - DNA, 23 bp, Artificial Sequence
  HLA-A targeting gRNA
aatgtgtgaatgcagacccaggg

SEQ ID NO: 1660 - DNA, 23 bp, Artificial Sequence
  HLA-A targeting gRNA
aattcatatcactcacagtgagg

SEQ ID NO: 1661 - DNA, 23 bp, Artificial Sequence
  HLA-A targeting gRNA
aagcgtcctgccggtacccgcgg

SEQ ID NO: 1662 - DNA, 23 bp, Artificial Sequence
  HLA-A targeting gRNA
aattcatatctgtcacagtgagg

SEQ ID NO: 1663 - DNA, 23 bp, Artificial Sequence
  HLA-A targeting gRNA
taccggcaggacgcttacgacgg

SEQ ID NO: 1664 - DNA, 23 bp, Artificial Sequence
  HLA-A targeting gRNA
tgccgtcgtaagcgtcctgccgg

SEQ ID NO: 1665 - DNA, 23 bp, Artificial Sequence
  HLA-A targeting gRNA
aattgtgtcacagagcaggccgg

SEQ ID NO: 1666 - DNA, 23 bp, Artificial Sequence
  HLA-A targeting gRNA
cagcagagagcctacctggatgg

SEQ ID NO: 1667 - DNA, 23 bp, Artificial Sequence
  HLA-A targeting gRNA
aagccccgcttcatcgccgtggg

SEQ ID NO: 1668 - DNA, 23 bp, Artificial Sequence
  HLA-A targeting gRNA
aagcggggcttcccgcggccggg

SEQ ID NO: 1669 - DNA, 23 bp, Artificial Sequence
  HLA-A targeting gRNA
acaagggtctcggagccccgcgg

SEQ ID NO: 1670 - DNA, 23 bp, Artificial Sequence
  HLA-A targeting gRNA
acaagggtctcggagtcccgcgg

SEQ ID NO: 1671 - DNA, 23 bp, Artificial Sequence
  HLA-A targeting gRNA
cgatgaagcggggcttcccgcgg

SEQ ID NO: 1672 - DNA, 23 bp, Artificial Sequence
  HLA-A targeting gRNA
gaagccccgcttcatcgccgtgg

SEQ ID NO: 1673 - DNA, 23 bp, Artificial Sequence
  HLA-A targeting gRNA
gaagcggggcttcccgcggccgg

SEQ ID NO: 1674 - DNA, 23 bp, Artificial Sequence
  HLA-A targeting gRNA
acacacaccggcggcagccttgg

SEQ ID NO: 1675 - DNA, 23 bp, Artificial Sequence
  HLA-A targeting gRNA
acacactgaccgagtggacctgg

SEQ ID NO: 1676 - DNA, 23 bp, Artificial Sequence
  HLA-A targeting gRNA
gggcttcccgcggccgggccggg

SEQ ID NO: 1677 - DNA, 23 bp, Artificial Sequence
  HLA-A targeting gRNA
ggggcttcccgcggccgggccgg

SEQ ID NO: 1678 - DNA, 23 bp, Artificial Sequence
  HLA-A targeting gRNA
aattgagtcagagagcagggcgg

SEQ ID NO: 1679 - DNA, 23 bp, Artificial Sequence
  HLA-A targeting gRNA
ccccgggcggggtcactcaccgg

SEQ ID NO: 1680 - DNA, 23 bp, Artificial Sequence
  HLA-A targeting gRNA
acacagggcccaggctgggtggg

SEQ ID NO: 1681 - DNA, 23 bp, Artificial Sequence
  HLA-A targeting gRNA
acaccaacacagacacatgcagg

SEQ ID NO: 1682 - DNA, 23 bp, Artificial Sequence
  HLA-A targeting gRNA
ccggtgagtgaccccgcccgggg

SEQ ID NO: 1683 - DNA, 23 bp, Artificial Sequence
  HLA-A targeting gRNA
cctgctctctgactcaattaagg

SEQ ID NO: 1684 - DNA, 23 bp, Artificial Sequence
  HLA-A targeting gRNA
ccttaattgagtcagagagcagg

SEQ ID NO: 1685 - DNA, 23 bp, Artificial Sequence
  HLA-A targeting gRNA
acacggagctcgtggaggccagg

SEQ ID NO: 1686 - DNA, 23 bp, Artificial Sequence
  HLA-A targeting gRNA
cggtgagtgaccccgcccggggg

SEQ ID NO: 1687 - DNA, 23 bp, Artificial Sequence
  HLA-A targeting gRNA
cgtgacctgcgcccccgggcggg

SEQ ID NO: 1688 - DNA, 23 bp, Artificial Sequence
  HLA-A targeting gRNA
ctctcaactgctccgcccgacgg

SEQ ID NO: 1689 - DNA, 23 bp, Artificial Sequence
  HLA-A targeting gRNA
ctgctctctgactcaattaaggg

SEQ ID NO: 1690 - DNA, 23 bp, Artificial Sequence
  HLA-A targeting gRNA
acactgaccgagtggacctgggg

SEQ ID NO: 1691 - DNA, 23 bp, Artificial Sequence
  HLA-A targeting gRNA
acactgacctgacagcgggatgg

SEQ ID NO: 1692 - DNA, 23 bp, Artificial Sequence
  HLA-A targeting gRNA
cttaattgagtcagagagcaggg

SEQ ID NO: 1693 - DNA, 23 bp, Artificial Sequence
  HLA-A targeting gRNA
acagaacatgtggctagaggagg

SEQ ID NO: 1694 - DNA, 23 bp, Artificial Sequence
  HLA-A targeting gRNA
gccggtgagtgaccccgcccggg

SEQ ID NO: 1695 - DNA, 23 bp, Artificial Sequence
  HLA-A targeting gRNA
ggccggtgagtgaccccgcccgg

SEQ ID NO: 1696 - DNA, 23 bp, Artificial Sequence
  HLA-A targeting gRNA
acagaatctggaaacccaggagg

SEQ ID NO: 1697 - DNA, 23 bp, Artificial Sequence
  HLA-A targeting gRNA
acagacctcaggagggcgattgg

SEQ ID NO: 1698 - DNA, 23 bp, Artificial Sequence
  HLA-A targeting gRNA
acagacctcaggagggcggttgg

SEQ ID NO: 1699 - DNA, 23 bp, Artificial Sequence
  HLA-A targeting gRNA
gggtcgtgacctgcgcccccggg

SEQ ID NO: 1700 - DNA, 23 bp, Artificial Sequence
  HLA-A targeting gRNA
acagactaaccgagcgaacctgg

SEQ ID NO: 1701 - DNA, 23 bp, Artificial Sequence
  HLA-A targeting gRNA
gtgaccccgcccgggggcgcagg

SEQ ID NO: 1702 - DNA, 23 bp, Artificial Sequence
  HLA-A targeting gRNA
gtgacctgcgcccccgggcgggg

SEQ ID NO: 1703 - DNA, 23 bp, Artificial Sequence
  HLA-A targeting gRNA
tcgtgacctgcgcccccgggcgg

SEQ ID NO: 1704 - DNA, 23 bp, Artificial Sequence
  HLA-A targeting gRNA
tctcaactgctccgcccgacggg

SEQ ID NO: 1705 - DNA, 23 bp, Artificial Sequence
  HLA-A targeting gRNA
acagcgacgccgcgagccaaagg

SEQ ID NO: 1706 - DNA, 23 bp, Artificial Sequence
  HLA-A targeting gRNA
aagtaccagggccccaggcgtgg

SEQ ID NO: 1707 - DNA, 23 bp, Artificial Sequence
  HLA-A targeting gRNA
aggggtcagggcgaagtaccagg

SEQ ID NO: 1708 - DNA, 23 bp, Artificial Sequence
  HLA-A targeting gRNA
gggcgaagtaccagggccccagg

SEQ ID NO: 1709 - DNA, 23 bp, Artificial Sequence
  HLA-A targeting gRNA
ggggtcagggcgaagtaccaggg

SEQ ID NO: 1710 - DNA, 23 bp, Artificial Sequence
  HLA-A targeting gRNA
acagactgaccgagagaacctgg

SEQ ID NO: 1711 - DNA, 23 bp, Artificial Sequence
  HLA-A targeting gRNA
accttgattacggcagtgatggg

SEQ ID NO: 1712 - DNA, 23 bp, Artificial Sequence
  HLA-A targeting gRNA
agactgaccgagagaacctgggg

SEQ ID NO: 1713 - DNA, 23 bp, Artificial Sequence
  HLA-A targeting gRNA
caccttgattacggcagtgatgg

SEQ ID NO: 1714 - DNA, 23 bp, Artificial Sequence
  HLA-A targeting gRNA
cagactgaccgagagaacctggg

SEQ ID NO: 1715 - DNA, 23 bp, Artificial Sequence
  HLA-A targeting gRNA
acccaataggagtgagaactggg

SEQ ID NO: 1716 - DNA, 23 bp, Artificial Sequence
  HLA-A targeting gRNA
gagaacctggggaccctgcgcgg

SEQ ID NO: 1717 - DNA, 23 bp, Artificial Sequence
  HLA-A targeting gRNA
acccaattggagtgagaactggg

SEQ ID NO: 1718 - DNA, 23 bp, Artificial Sequence
  HLA-A targeting gRNA
acccagaccagcctggacacagg

SEQ ID NO: 1719 - DNA, 23 bp, Artificial Sequence
  HLA-A targeting gRNA
acccagcagtcacaagtcacagg

SEQ ID NO: 1720 - DNA, 23 bp, Artificial Sequence
  HLA-A targeting gRNA
acccagttctcactccaattggg

SEQ ID NO: 1721 - DNA, 23 bp, Artificial Sequence
  HLA-A targeting gRNA
gcagggtccccaggttctctcgg

SEQ ID NO: 1722 - DNA, 23 bp, Artificial Sequence
  HLA-A targeting gRNA
tcccatcactgccgtaatcaagg

SEQ ID NO: 1723 - DNA, 23 bp, Artificial Sequence
  HLA-A targeting gRNA
acccagttctcactcctattggg

SEQ ID NO: 1724 - DNA, 23 bp, Artificial Sequence
  HLA-A targeting gRNA
ttgggtgttgggcagaacagtgg

SEQ ID NO: 1725 - DNA, 23 bp, Artificial Sequence
  HLA-A targeting gRNA
acccctcatcccctacggacggg

SEQ ID NO: 1726 - DNA, 23 bp, Artificial Sequence
  HLA-A targeting gRNA
acccctcattccccacggacggg

SEQ ID NO: 1727 - DNA, 23 bp, Artificial Sequence
  HLA-A targeting gRNA
acccgccctggtctgggtcaggg

SEQ ID NO: 1728 - DNA, 23 bp, Artificial Sequence
  HLA-A targeting gRNA
attggggagtcacagccttgggg

SEQ ID NO: 1729 - DNA, 23 bp, Artificial Sequence
  HLA-A targeting gRNA
gattggggagtcacagccttggg

SEQ ID NO: 1730 - DNA, 23 bp, Artificial Sequence
  HLA-A targeting gRNA
ggattggggagtcacagccttgg

SEQ ID NO: 1731 - DNA, 23 bp, Artificial Sequence
  HLA-A targeting gRNA
aacaggaaagatgattggagagg

SEQ ID NO: 1732 - DNA, 23 bp, Artificial Sequence
  HLA-A targeting gRNA
acaggaaagatgattggagaggg

SEQ ID NO: 1733 - DNA, 23 bp, Artificial Sequence
  HLA-A targeting gRNA
atttctacacttccgtgtcccgg

SEQ ID NO: 1734 - DNA, 23 bp, Artificial Sequence
  HLA-A targeting gRNA
accctgagatgggataaggaggg

SEQ ID NO: 1735 - DNA, 23 bp, Artificial Sequence
  HLA-A targeting gRNA
ggaagtgtagaaatacctcatgg

SEQ ID NO: 1736 - DNA, 23 bp, Artificial Sequence
  HLA-A targeting gRNA
accctgagatgggttaaggaggg

SEQ ID NO: 1737 - DNA, 23 bp, Artificial Sequence
  HLA-A targeting gRNA
tacacttccgtgtcccggcccgg

SEQ ID NO: 1738 - DNA, 23 bp, Artificial Sequence
  HLA-A targeting gRNA
atttctacacctccatgtcccgg

SEQ ID NO: 1739 - DNA, 23 bp, Artificial Sequence
  HLA-A targeting gRNA
accgggctgaccgcggggtcggg

SEQ ID NO: 1740 - DNA, 23 bp, Artificial Sequence
  HLA-A targeting gRNA
gcggccgggccgggacatggagg

SEQ ID NO: 1741 - DNA, 23 bp, Artificial Sequence
  HLA-A targeting gRNA
tacacctccatgtcccggcccgg

SEQ ID NO: 1742 - DNA, 23 bp, Artificial Sequence
  HLA-A targeting gRNA
tccatgtcccggcccggccgcgg

SEQ ID NO: 1743 - DNA, 23 bp, Artificial Sequence
  HLA-A targeting gRNA
acctcatggagtaggagcctggg

SEQ ID NO: 1744 - DNA, 23 bp, Artificial Sequence
  HLA-A targeting gRNA
acccgaccctcctcccggcgcgg

SEQ ID NO: 1745 - DNA, 23 bp, Artificial Sequence
  HLA-A targeting gRNA
cgccgggaggagggtcgggtggg

SEQ ID NO: 1746 - DNA, 23 bp, Artificial Sequence
  HLA-A targeting gRNA
acctcatggattgggagcctggg

SEQ ID NO: 1747 - DNA, 23 bp, Artificial Sequence
  HLA-A targeting gRNA
gacccacccgaccctcctcccgg

SEQ ID NO: 1748 - DNA, 23 bp, Artificial Sequence
  HLA-A targeting gRNA
gcgccgggaggagggtcgggtgg

SEQ ID NO: 1749 - DNA, 23 bp, Artificial Sequence
  HLA-A targeting gRNA
acttcaagtcacaaagggaaggg

SEQ ID NO: 1750 - DNA, 23 bp, Artificial Sequence
  HLA-A targeting gRNA
agggtacttcaagtcacaaaggg

SEQ ID NO: 1751 - DNA, 23 bp, Artificial Sequence
  HLA-A targeting gRNA
cagggtacttcaagtcacaaagg

SEQ ID NO: 1752 - DNA, 23 bp, Artificial Sequence
  HLA-A targeting gRNA
tacttcaagtcacaaagggaagg

SEQ ID NO: 1753 - DNA, 23 bp, Artificial Sequence
  HLA-A targeting gRNA
aaaaattcccccgggttggtcgg

SEQ ID NO: 1754 - DNA, 23 bp, Artificial Sequence
  HLA-A targeting gRNA
aaaattcccccgggttggtcggg

SEQ ID NO: 1755 - DNA, 23 bp, Artificial Sequence
  HLA-A targeting gRNA
aaattcccccgggttggtcgggg

SEQ ID NO: 1756 - DNA, 23 bp, Artificial Sequence
  HLA-A targeting gRNA
aatcatgggcctacccagcctgg

SEQ ID NO: 1757 - DNA, 23 bp, Artificial Sequence
  HLA-A targeting gRNA
acagcacgcctacgacggcaagg

SEQ ID NO: 1758 - DNA, 23 bp, Artificial Sequence
  HLA-A targeting gRNA
aggcgtgctgttcatacccgcgg

SEQ ID NO: 1759 - DNA, 23 bp, Artificial Sequence
  HLA-A targeting gRNA
atcatgggcctacccagcctggg

SEQ ID NO: 1760 - DNA, 23 bp, Artificial Sequence
  HLA-A targeting gRNA
cctgggcctctcccgggtcaagg

SEQ ID NO: 1761 - DNA, 23 bp, Artificial Sequence
  HLA-A targeting gRNA
ccttgacccgggagaggcccagg

SEQ ID NO: 1762 - DNA, 23 bp, Artificial Sequence
  HLA-A targeting gRNA
actccacgaactcgccctccagg

SEQ ID NO: 1763 - DNA, 23 bp, Artificial Sequence
  HLA-A targeting gRNA
cgagacccttgacccgggagagg

SEQ ID NO: 1764 - DNA, 23 bp, Artificial Sequence
  HLA-A targeting gRNA
cgtgctgttcatacccgcggagg

SEQ ID NO: 1765 - DNA, 23 bp, Artificial Sequence
  HLA-A targeting gRNA
ctcccgggtcaagggtctcgggg

SEQ ID NO: 1766 - DNA, 23 bp, Artificial Sequence
  HLA-A targeting gRNA
ctctcccgggtcaagggtctcgg

SEQ ID NO: 1767 - DNA, 23 bp, Artificial Sequence
  HLA-A targeting gRNA
ctgggcctctcccgggtcaaggg

SEQ ID NO: 1768 - DNA, 23 bp, Artificial Sequence
  HLA-A targeting gRNA
gaccaacccgggggaatttttgg

SEQ ID NO: 1769 - DNA, 23 bp, Artificial Sequence
  HLA-A targeting gRNA
gaccccgagacccttgacccggg

SEQ ID NO: 1770 - DNA, 23 bp, Artificial Sequence
  HLA-A targeting gRNA
actctgaggtgctgggccctggg

SEQ ID NO: 1771 - DNA, 23 bp, Artificial Sequence
  HLA-A targeting gRNA
actgacctgacagcgggatgggg

SEQ ID NO: 1772 - DNA, 23 bp, Artificial Sequence
  HLA-A targeting gRNA
actgacctggcagcgggataggg

SEQ ID NO: 1773 - DNA, 23 bp, Artificial Sequence
  HLA-A targeting gRNA
gctgggtaggcccatgattgtgg

SEQ ID NO: 1774 - DNA, 23 bp, Artificial Sequence
  HLA-A targeting gRNA
ggaccccgagacccttgacccgg

SEQ ID NO: 1775 - DNA, 23 bp, Artificial Sequence
  HLA-A targeting gRNA
ggccaaaaattcccccgggttgg

SEQ ID NO: 1776 - DNA, 23 bp, Artificial Sequence
  HLA-A targeting gRNA
ggggtcgtgacctgcgcccccgg

SEQ ID NO: 1777 - DNA, 23 bp, Artificial Sequence
  HLA-A targeting gRNA
ggtaggcccatgattgtggatgg

SEQ ID NO: 1778 - DNA, 23 bp, Artificial Sequence
  HLA-A targeting gRNA
gtttaggccaaaaattcccccgg

SEQ ID NO: 1779 - DNA, 23 bp, Artificial Sequence
  HLA-A targeting gRNA
tatgaacagcacgcctacgacgg

SEQ ID NO: 1780 - DNA, 23 bp, Artificial Sequence
  HLA-A targeting gRNA
tcaagggtctcggggtcccgcgg

SEQ ID NO: 1781 - DNA, 23 bp, Artificial Sequence
  HLA-A targeting gRNA
tcccccgggttggtcggggctgg

SEQ ID NO: 1782 - DNA, 23 bp, Artificial Sequence
  HLA-A targeting gRNA
tctcccgggtcaagggtctcggg

SEQ ID NO: 1783 - DNA, 23 bp, Artificial Sequence
  HLA-A targeting gRNA
tttaggccaaaaattcccccggg

SEQ ID NO: 1784 - DNA, 23 bp, Artificial Sequence
  HLA-A targeting gRNA
aagagggtcatggtggacatcgg

SEQ ID NO: 1785 - DNA, 23 bp, Artificial Sequence
  HLA-A targeting gRNA
agagggtcatggtggacatcggg

SEQ ID NO: 1786 - DNA, 23 bp, Artificial Sequence
  HLA-A targeting gRNA
gagggtcatggtggacatcgggg

SEQ ID NO: 1787 - DNA, 23 bp, Artificial Sequence
  HLA-A targeting gRNA
caagtgggaggcggcccgtcggg

SEQ ID NO: 1788 - DNA, 23 bp, Artificial Sequence
  HLA-A targeting gRNA
gcaagtgggaggcggcccgtcgg

SEQ ID NO: 1789 - DNA, 23 bp, Artificial Sequence
  HLA-A targeting gRNA
agaagagctcaggtggagaaggg

SEQ ID NO: 1790 - DNA, 23 bp, Artificial Sequence
  HLA-A targeting gRNA
gtgggaggcggcccgtcgggcgg

SEQ ID NO: 1791 - DNA, 23 bp, Artificial Sequence
  HLA-A targeting gRNA
gatgattggagagggagcacagg

SEQ ID NO: 1792 - DNA, 23 bp, Artificial Sequence
  HLA-A targeting gRNA
agtattgggacctgcagacacgg

SEQ ID NO: 1793 - DNA, 23 bp, Artificial Sequence
  HLA-A targeting gRNA
cctgcagacacggaatgtgaagg

SEQ ID NO: 1794 - DNA, 23 bp, Artificial Sequence
  HLA-A targeting gRNA
agaccaggcctgcaggggatggg

SEQ ID NO: 1795 - DNA, 23 bp, Artificial Sequence
  HLA-A targeting gRNA
agaccagggcgggtgagtgcggg

SEQ ID NO: 1796 - DNA, 23 bp, Artificial Sequence
  HLA-A targeting gRNA
ccttcacattccgtgtctgcagg

SEQ ID NO: 1797 - DNA, 23 bp, Artificial Sequence
  HLA-A targeting gRNA
agactaaccgagcgaacctgggg

SEQ ID NO: 1798 - DNA, 23 bp, Artificial Sequence
  HLA-A targeting gRNA
agactgaccgagagaaactgcgg

SEQ ID NO: 1799 - DNA, 23 bp, Artificial Sequence
  HLA-A targeting gRNA
acgctgcagcgcacgggtaccgg

SEQ ID NO: 1800 - DNA, 23 bp, Artificial Sequence
  HLA-A targeting gRNA
caccgtggatagagcaggagggg

SEQ ID NO: 1801 - DNA, 23 bp, Artificial Sequence
  HLA-A targeting gRNA
cacgggtaccgggggccacgggg

SEQ ID NO: 1802 - DNA, 23 bp, Artificial Sequence
  HLA-A targeting gRNA
cccggcggggacgcaggacccgg

SEQ ID NO: 1803 - DNA, 23 bp, Artificial Sequence
  HLA-A targeting gRNA
cccgggtcctgcgtccccgccgg

SEQ ID NO: 1804 - DNA, 23 bp, Artificial Sequence
  HLA-A targeting gRNA
agagagtgactctgaggttccgg

SEQ ID NO: 1805 - DNA, 23 bp, Artificial Sequence
  HLA-A targeting gRNA
agagcagttgagagcctacctgg

SEQ ID NO: 1806 - DNA, 23 bp, Artificial Sequence
  HLA-A targeting gRNA
ccggcggggacgcaggacccggg

SEQ ID NO: 1807 - DNA, 23 bp, Artificial Sequence
  HLA-A targeting gRNA
ccgggtcctgcgtccccgccggg

SEQ ID NO: 1808 - DNA, 23 bp, Artificial Sequence
  HLA-A targeting gRNA
cgcacgggtaccgggggccacgg

SEQ ID NO: 1809 - DNA, 23 bp, Artificial Sequence
  HLA-A targeting gRNA
cgctcggtcagtctgtgactggg

SEQ ID NO: 1810 - DNA, 23 bp, Artificial Sequence
  HLA-A targeting gRNA
cgctgcagcgcacgggtaccggg

SEQ ID NO: 1811 - DNA, 23 bp, Artificial Sequence
  HLA-A targeting gRNA
ctgcagcgcacgggtaccggggg

SEQ ID NO: 1812 - DNA, 23 bp, Artificial Sequence
  HLA-A targeting gRNA
gcaccgtggatagagcaggaggg

SEQ ID NO: 1813 - DNA, 23 bp, Artificial Sequence
  HLA-A targeting gRNA
gcacgggtaccgggggccacggg

SEQ ID NO: 1814 - DNA, 23 bp, Artificial Sequence
  HLA-A targeting gRNA
gctgcagcgcacgggtaccgggg

SEQ ID NO: 1815 - DNA, 23 bp, Artificial Sequence
  HLA-A targeting gRNA
ggcaccgtggatagagcaggagg

SEQ ID NO: 1816 - DNA, 23 bp, Artificial Sequence
  HLA-A targeting gRNA
ggcccgcccggcggggacgcagg

SEQ ID NO: 1817 - DNA, 23 bp, Artificial Sequence
  HLA-A targeting gRNA
gggaggcgccccgtggcccccgg

SEQ ID NO: 1818 - DNA, 23 bp, Artificial Sequence
  HLA-A targeting gRNA
ggtcctgcgtccccgccgggcgg

SEQ ID NO: 1819 - DNA, 23 bp, Artificial Sequence
  HLA-A targeting gRNA
gtcctgcgtccccgccgggcggg

SEQ ID NO: 1820 - DNA, 23 bp, Artificial Sequence
  HLA-A targeting gRNA
agatcacactgacctgacagcgg

SEQ ID NO: 1821 - DNA, 23 bp, Artificial Sequence
  HLA-A targeting gRNA
tcgctcggtcagtctgtgactgg

SEQ ID NO: 1822 - DNA, 23 bp, Artificial Sequence
  HLA-A targeting gRNA
agatccaccccgaagccgcgggg

SEQ ID NO: 1823 - DNA, 23 bp, Artificial Sequence
  HLA-A targeting gRNA
aagcggggctctccactgccggg

SEQ ID NO: 1824 - DNA, 23 bp, Artificial Sequence
  HLA-A targeting gRNA
agagggagcacaggtcagcgtgg

SEQ ID NO: 1825 - DNA, 23 bp, Artificial Sequence
  HLA-A targeting gRNA
cgccgggaggagggtcggtcagg

SEQ ID NO: 1826 - DNA, 23 bp, Artificial Sequence
  HLA-A targeting gRNA
agatggagccgcgggcgccgtgg

SEQ ID NO: 1827 - DNA, 23 bp, Artificial Sequence
  HLA-A targeting gRNA
gaagcggggctctccactgccgg

SEQ ID NO: 1828 - DNA, 23 bp, Artificial Sequence
  HLA-A targeting gRNA
agatgggataaggagggagatgg

SEQ ID NO: 1829 - DNA, 23 bp, Artificial Sequence
  HLA-A targeting gRNA
gaccgaccctcctcccggcgcgg

SEQ ID NO: 1830 - DNA, 23 bp, Artificial Sequence
  HLA-A targeting gRNA
gacctgaccgaccctcctcccgg

SEQ ID NO: 1831 - DNA, 23 bp, Artificial Sequence
  HLA-A targeting gRNA
agatgggttaaggagggagatgg

SEQ ID NO: 1832 - DNA, 23 bp, Artificial Sequence
  HLA-A targeting gRNA
gggctctccactgccgggccggg

SEQ ID NO: 1833 - DNA, 23 bp, Artificial Sequence
  HLA-A targeting gRNA
ggggctctccactgccgggccgg

SEQ ID NO: 1834 - DNA, 23 bp, Artificial Sequence
  HLA-A targeting gRNA
tccactgccgggccgggacacgg

SEQ ID NO: 1835 - DNA, 23 bp, Artificial Sequence
  HLA-A targeting gRNA
tccgtgtcccggcccggcagtgg

SEQ ID NO: 1836 - DNA, 23 bp, Artificial Sequence
  HLA-A targeting gRNA
agactctgagagccacgcctggg

SEQ ID NO: 1837 - DNA, 23 bp, Artificial Sequence
  HLA-A targeting gRNA
agcacctcagagtggcctcatgg

SEQ ID NO: 1838 - DNA, 23 bp, Artificial Sequence
  HLA-A targeting gRNA
agagtctcaggccccgaaggcgg

SEQ ID NO: 1839 - DNA, 23 bp, Artificial Sequence
  HLA-A targeting gRNA
ctcagagtctcaggccccgaagg

SEQ ID NO: 1840 - DNA, 23 bp, Artificial Sequence
  HLA-A targeting gRNA
gactctgagagccacgcctgggg

SEQ ID NO: 1841 - DNA, 23 bp, Artificial Sequence
  HLA-A targeting gRNA
agcagagaacagggcctgagagg

SEQ ID NO: 1842 - DNA, 23 bp, Artificial Sequence
  HLA-A targeting gRNA
agcagagaacgaggcctgagagg

SEQ ID NO: 1843 - DNA, 23 bp, Artificial Sequence
  HLA-A targeting gRNA
gagactctgagagccacgcctgg

SEQ ID NO: 1844 - DNA, 23 bp, Artificial Sequence
  HLA-A targeting gRNA
agcaggaggagccggagtattgg

SEQ ID NO: 1845 - DNA, 23 bp, Artificial Sequence
  HLA-A targeting gRNA
agcaggaggagggttcggggcgg

SEQ ID NO: 1846 - DNA, 23 bp, Artificial Sequence
  HLA-A targeting gRNA
ggcgtggctctcagagtctcagg

SEQ ID NO: 1847 - DNA, 23 bp, Artificial Sequence
  HLA-A targeting gRNA
aagacactgattggcttctctgg

SEQ ID NO: 1848 - DNA, 23 bp, Artificial Sequence
  HLA-A targeting gRNA
gtctgcaggtcccaatactccgg

SEQ ID NO: 1849 - DNA, 23 bp, Artificial Sequence
  HLA-A targeting gRNA
ggtcatggtggacatcggggtgg

SEQ ID NO: 1850 - DNA, 23 bp, Artificial Sequence
  HLA-A targeting gRNA
agccattttgcatctgtcatggg

SEQ ID NO: 1851 - DNA, 23 bp, Artificial Sequence
  HLA-A targeting gRNA
gtcatggtggacatcggggtggg

SEQ ID NO: 1852 - DNA, 23 bp, Artificial Sequence
  HLA-A targeting gRNA
gcgggcaccgtggatagagcagg

SEQ ID NO: 1853 - DNA, 23 bp, Artificial Sequence
  HLA-A targeting gRNA
ggatggagccgcgggcaccgtgg

SEQ ID NO: 1854 - DNA, 23 bp, Artificial Sequence
  HLA-A targeting gRNA
gtgcccgcggctccatcctctgg

SEQ ID NO: 1855 - DNA, 23 bp, Artificial Sequence
  HLA-A targeting gRNA
tgctctatccacggtgcccgcgg

SEQ ID NO: 1856 - DNA, 23 bp, Artificial Sequence
  HLA-A targeting gRNA
agcgcccgtccgaccccacgtgg

SEQ ID NO: 1857 - DNA, 23 bp, Artificial Sequence
  HLA-A targeting gRNA
agcgcgatccgcagttctctcgg

SEQ ID NO: 1858 - DNA, 23 bp, Artificial Sequence
  HLA-A targeting gRNA
agatctacaggcgatcaggaagg

SEQ ID NO: 1859 - DNA, 23 bp, Artificial Sequence
  HLA-A targeting gRNA
gcgatcaggaaggcgccccgtgg

SEQ ID NO: 1860 - DNA, 23 bp, Artificial Sequence
  HLA-A targeting gRNA
gcgtcttgggggggtctgtcagg

SEQ ID NO: 1861 - DNA, 23 bp, Artificial Sequence
  HLA-A targeting gRNA
ggaaggcgccccgtggcccctgg

SEQ ID NO: 1862 - DNA, 23 bp, Artificial Sequence
  HLA-A targeting gRNA
gaagccaatcagtgtcttcgcgg

SEQ ID NO: 1863 - DNA, 23 bp, Artificial Sequence
  HLA-A targeting gRNA
gcgaccgcgaagacactgattgg

SEQ ID NO: 1864 - DNA, 23 bp, Artificial Sequence
  HLA-A targeting gRNA
caagtgggaggcggcccatgcgg

SEQ ID NO: 1865 - DNA, 23 bp, Artificial Sequence
  HLA-A targeting gRNA
ctctctgctgctccgccgcatgg

SEQ ID NO: 1866 - DNA, 23 bp, Artificial Sequence
  HLA-A targeting gRNA
gtgggaggcggcccatgcggcgg

SEQ ID NO: 1867 - DNA, 23 bp, Artificial Sequence
  HLA-A targeting gRNA
tctctgctgctccgccgcatggg

SEQ ID NO: 1868 - DNA, 23 bp, Artificial Sequence
  HLA-A targeting gRNA
gagtcatatgcgtcttggggggg

SEQ ID NO: 1869 - DNA, 23 bp, Artificial Sequence
  HLA-A targeting gRNA
tgagtcatatgcgtcttgggggg

SEQ ID NO: 1870 - DNA, 23 bp, Artificial Sequence
  HLA-A targeting gRNA
tcatggtggacatcggggtgggg

SEQ ID NO: 1871 - DNA, 23 bp, Artificial Sequence
  HLA-A targeting gRNA
tggtggacatcggggtggggtgg

SEQ ID NO: 1872 - DNA, 23 bp, Artificial Sequence
  HLA-A targeting gRNA
cagattctccccagaccccgagg

SEQ ID NO: 1873 - DNA, 23 bp, Artificial Sequence
  HLA-A targeting gRNA
cagccccacctctctgcaacagg

SEQ ID NO: 1874 - DNA, 23 bp, Artificial Sequence
  HLA-A targeting gRNA
ctttcctgttgcagagaggtggg

SEQ ID NO: 1875 - DNA, 23 bp, Artificial Sequence
  HLA-A targeting gRNA
aggacggtgaccccggcccgggg

SEQ ID NO: 1876 - DNA, 23 bp, Artificial Sequence
  HLA-A targeting gRNA
aggagcctgggggcgaggagtgg

SEQ ID NO: 1877 - DNA, 23 bp, Artificial Sequence
  HLA-A targeting gRNA
gttgcagagaggtggggctgagg

SEQ ID NO: 1878 - DNA, 23 bp, Artificial Sequence
  HLA-A targeting gRNA
tctttcctgttgcagagaggtgg

SEQ ID NO: 1879 - DNA, 23 bp, Artificial Sequence
  HLA-A targeting gRNA
ttctccccagaccccgaggatgg

SEQ ID NO: 1880 - DNA, 23 bp, Artificial Sequence
  HLA-A targeting gRNA
aggatggagccgcgagccagagg

SEQ ID NO: 1881 - DNA, 23 bp, Artificial Sequence
  HLA-A targeting gRNA
tttcctgttgcagagaggtgggg

SEQ ID NO: 1882 - DNA, 23 bp, Artificial Sequence
  HLA-A targeting gRNA
aggatgtatggttgcgacgtggg

SEQ ID NO: 1883 - DNA, 23 bp, Artificial Sequence
  HLA-A targeting gRNA
aattgtgtcacagagcagggcgg

SEQ ID NO: 1884 - DNA, 23 bp, Artificial Sequence
  HLA-A targeting gRNA
aggcataatgtgaggagataggg

SEQ ID NO: 1885 - DNA, 23 bp, Artificial Sequence
  HLA-A targeting gRNA
cttaattgtgtcacagagcaggg

SEQ ID NO: 1886 - DNA, 23 bp, Artificial Sequence
  HLA-A targeting gRNA
ctgcaacaggaaagatgattggg

SEQ ID NO: 1887 - DNA, 23 bp, Artificial Sequence
  HLA-A targeting gRNA
tcatctttcctgttgcagagagg

SEQ ID NO: 1888 - DNA, 23 bp, Artificial Sequence
  HLA-A targeting gRNA
aggccaaaaatccccccgggtgg

SEQ ID NO: 1889 - DNA, 23 bp, Artificial Sequence
  HLA-A targeting gRNA
aggccaaaaatccccctggttgg

SEQ ID NO: 1890 - DNA, 23 bp, Artificial Sequence
  HLA-A targeting gRNA
aggcccaggcgcctttaacccgg

SEQ ID NO: 1891 - DNA, 23 bp, Artificial Sequence
  HLA-A targeting gRNA
tctgcaacaggaaagatgattgg

SEQ ID NO: 1892 - DNA, 23 bp, Artificial Sequence
  HLA-A targeting gRNA
tgcaacaggaaagatgattgggg

SEQ ID NO: 1893 - DNA, 23 bp, Artificial Sequence
  HLA-A targeting gRNA
aggcgacctgccggtacccgcgg

SEQ ID NO: 1894 - DNA, 23 bp, Artificial Sequence
  HLA-A targeting gRNA
acggccatcctcggggtctgggg

SEQ ID NO: 1895 - DNA, 23 bp, Artificial Sequence
  HLA-A targeting gRNA
cgccatgacggccatcctcgggg

SEQ ID NO: 1896 - DNA, 23 bp, Artificial Sequence
  HLA-A targeting gRNA
gaccccgaggatggccgtcatgg

SEQ ID NO: 1897 - DNA, 23 bp, Artificial Sequence
  HLA-A targeting gRNA
gacggccatcctcggggtctggg

SEQ ID NO: 1898 - DNA, 23 bp, Artificial Sequence
  HLA-A targeting gRNA
aggcgtgctgccggtacccgcgg

SEQ ID NO: 1899 - DNA, 23 bp, Artificial Sequence
  HLA-A targeting gRNA
gcgccatgacggccatcctcggg

SEQ ID NO: 1900 - DNA, 23 bp, Artificial Sequence
  HLA-A targeting gRNA
tgacggccatcctcggggtctgg

SEQ ID NO: 1901 - DNA, 23 bp, Artificial Sequence
  HLA-A targeting gRNA
agagagcctacctggagggccgg

SEQ ID NO: 1902 - DNA, 23 bp, Artificial Sequence
  HLA-A targeting gRNA
aatcactgggatattgtgtttgg

SEQ ID NO: 1903 - DNA, 23 bp, Artificial Sequence
  HLA-A targeting gRNA
acaatatcccagtgatttcttgg

SEQ ID NO: 1904 - DNA, 23 bp, Artificial Sequence
  HLA-A targeting gRNA
agggctccccgcggccgggccgg

SEQ ID NO: 1905 - DNA, 23 bp, Artificial Sequence
  HLA-A targeting gRNA
acagattgaccgagtggacctgg

SEQ ID NO: 1906 - DNA, 23 bp, Artificial Sequence
  HLA-A targeting gRNA
agagctcaggtggggtgaagggg

SEQ ID NO: 1907 - DNA, 23 bp, Artificial Sequence
  HLA-A targeting gRNA
aggggccggagtattgggacggg

SEQ ID NO: 1908 - DNA, 23 bp, Artificial Sequence
  HLA-A targeting gRNA
aggggctctgaccctgataaagg

SEQ ID NO: 1909 - DNA, 23 bp, Artificial Sequence
  HLA-A targeting gRNA
aggggctctgaccctgctaaagg

SEQ ID NO: 1910 - DNA, 23 bp, Artificial Sequence
  HLA-A targeting gRNA
agattgaccgagtggacctgggg

SEQ ID NO: 1911 - DNA, 23 bp, Artificial Sequence
  HLA-A targeting gRNA
aggatgatccaagaaatcactgg

SEQ ID NO: 1912 - DNA, 23 bp, Artificial Sequence
  HLA-A targeting gRNA
aggcattttgcatctgtaatggg

SEQ ID NO: 1913 - DNA, 23 bp, Artificial Sequence
  HLA-A targeting gRNA
aggtggggtgaaggggtgaaggg

SEQ ID NO: 1914 - DNA, 23 bp, Artificial Sequence
  HLA-A targeting gRNA
atcactgggatattgtgtttggg

SEQ ID NO: 1915 - DNA, 23 bp, Artificial Sequence
  HLA-A targeting gRNA
atctcagggtgaggggcttgggg

SEQ ID NO: 1916 - DNA, 23 bp, Artificial Sequence
  HLA-A targeting gRNA
cactcggtcaatctgtgagtggg

SEQ ID NO: 1917 - DNA, 23 bp, Artificial Sequence
  HLA-A targeting gRNA
agggtttttcaagtcacaaaggg

SEQ ID NO: 1918 - DNA, 23 bp, Artificial Sequence
  HLA-A targeting gRNA
aggtcagtgtgatctccacaggg

SEQ ID NO: 1919 - DNA, 23 bp, Artificial Sequence
  HLA-A targeting gRNA
cagattgaccgagtggacctggg

SEQ ID NO: 1920 - DNA, 23 bp, Artificial Sequence
  HLA-A targeting gRNA
aggtcagtgtgatctctgcaggg

SEQ ID NO: 1921 - DNA, 23 bp, Artificial Sequence
  HLA-A targeting gRNA
caggcattttgcatctgtaatgg

SEQ ID NO: 1922 - DNA, 23 bp, Artificial Sequence
  HLA-A targeting gRNA
caggtggggtgaaggggtgaagg

SEQ ID NO: 1923 - DNA, 23 bp, Artificial Sequence
  HLA-A targeting gRNA
ccactcacagattgaccgagtgg

SEQ ID NO: 1924 - DNA, 23 bp, Artificial Sequence
  HLA-A targeting gRNA
ccactcggtcaatctgtgagtgg

SEQ ID NO: 1925 - DNA, 23 bp, Artificial Sequence
  HLA-A targeting gRNA
ccaggtcacccacagtctccggg

SEQ ID NO: 1926 - DNA, 23 bp, Artificial Sequence
  HLA-A targeting gRNA
aggtgggtgagctcccccatggg

SEQ ID NO: 1927 - DNA, 23 bp, Artificial Sequence
  HLA-A targeting gRNA
cccggagactgtgggtgacctgg

SEQ ID NO: 1928 - DNA, 23 bp, Artificial Sequence
  HLA-A targeting gRNA
cctgctctgtgacacaattaagg

SEQ ID NO: 1929 - DNA, 23 bp, Artificial Sequence
  HLA-A targeting gRNA
ccttaattgtgtcacagagcagg

SEQ ID NO: 1930 - DNA, 23 bp, Artificial Sequence
  HLA-A targeting gRNA
ctgctctgtgacacaattaaggg

SEQ ID NO: 1931 - DNA, 23 bp, Artificial Sequence
  HLA-A targeting gRNA
gccaggtcacccacagtctccgg

SEQ ID NO: 1932 - DNA, 23 bp, Artificial Sequence
  HLA-A targeting gRNA
ggagaccctcatgctgcacatgg

SEQ ID NO: 1933 - DNA, 23 bp, Artificial Sequence
  HLA-A targeting gRNA
agtagccgtgcagggtccccagg

SEQ ID NO: 1934 - DNA, 23 bp, Artificial Sequence
  HLA-A targeting gRNA
ggatgatccaagaaatcactggg

SEQ ID NO: 1935 - DNA, 23 bp, Artificial Sequence
  HLA-A targeting gRNA
ggggtgaaggggtgaagggtggg

SEQ ID NO: 1936 - DNA, 23 bp, Artificial Sequence
  HLA-A targeting gRNA
agtattgggaccaggagacgcgg

SEQ ID NO: 1937 - DNA, 23 bp, Artificial Sequence
  HLA-A targeting gRNA
gggtgacctggcccgtccgtggg

SEQ ID NO: 1938 - DNA, 23 bp, Artificial Sequence
  HLA-A targeting gRNA
ggtgacctggcccgtccgtgggg

SEQ ID NO: 1939 - DNA, 23 bp, Artificial Sequence
  HLA-A targeting gRNA
agtattgggacgaggagacacgg

SEQ ID NO: 1940 - DNA, 23 bp, Artificial Sequence
  HLA-A targeting gRNA
gtgacctggcccgtccgtggggg

SEQ ID NO: 1941 - DNA, 23 bp, Artificial Sequence
  HLA-A targeting gRNA
tggggtgaaggggtgaagggtgg

SEQ ID NO: 1942 - DNA, 23 bp, Artificial Sequence
  HLA-A targeting gRNA
agtcatatgcgtcttgggggggg

SEQ ID NO: 1943 - DNA, 23 bp, Artificial Sequence
  HLA-A targeting gRNA
tgggtgacctggcccgtccgtgg

SEQ ID NO: 1944 - DNA, 23 bp, Artificial Sequence
  HLA-A targeting gRNA
accctacataggttggcagaggg

SEQ ID NO: 1945 - DNA, 23 bp, Artificial Sequence
  HLA-A targeting gRNA
cagagggagaaaagaaactgcgg

SEQ ID NO: 1946 - DNA, 23 bp, Artificial Sequence
  HLA-A targeting gRNA
cgggttggtcggggccgggcagg

SEQ ID NO: 1947 - DNA, 23 bp, Artificial Sequence
  HLA-A targeting gRNA
agtgggagactccgcccatgagg

SEQ ID NO: 1948 - DNA, 23 bp, Artificial Sequence
  HLA-A targeting gRNA
agtgtgacccctcactgtgatgg

SEQ ID NO: 1949 - DNA, 23 bp, Artificial Sequence
  HLA-A targeting gRNA
ctccctctgccaacctatgtagg

SEQ ID NO: 1950 - DNA, 23 bp, Artificial Sequence
  HLA-A targeting gRNA
ctgcccggccccgaccaacccgg

SEQ ID NO: 1951 - DNA, 23 bp, Artificial Sequence
  HLA-A targeting gRNA
agttggggaatctccaaggctgg

SEQ ID NO: 1952 - DNA, 23 bp, Artificial Sequence
  HLA-A targeting gRNA
gaccctacataggttggcagagg

SEQ ID NO: 1953 - DNA, 23 bp, Artificial Sequence
  HLA-A targeting gRNA
gggttggtcggggccgggcaggg

SEQ ID NO: 1954 - DNA, 23 bp, Artificial Sequence
  HLA-A targeting gRNA
atattgtggttgggagcccatgg

SEQ ID NO: 1955 - DNA, 23 bp, Artificial Sequence
  HLA-A targeting gRNA
tccctctgccaacctatgtaggg

SEQ ID NO: 1956 - DNA, 23 bp, Artificial Sequence
  HLA-A targeting gRNA
tgcccggccccgaccaacccggg

SEQ ID NO: 1957 - DNA, 23 bp, Artificial Sequence
  HLA-A targeting gRNA
accagcagtcacaagtcacaggg

SEQ ID NO: 1958 - DNA, 23 bp, Artificial Sequence
  HLA-A targeting gRNA
atcatgggcccacccagcctggg

SEQ ID NO: 1959 - DNA, 23 bp, Artificial Sequence
  HLA-A targeting gRNA
gacttgtgactgctggtatcagg

SEQ ID NO: 1960 - DNA, 23 bp, Artificial Sequence
  HLA-A targeting gRNA
taccagcagtcacaagtcacagg

SEQ ID NO: 1961 - DNA, 23 bp, Artificial Sequence
  HLA-A targeting gRNA
gatccgcccgaccctcctcccgg

SEQ ID NO: 1962 - DNA, 23 bp, Artificial Sequence
  HLA-A targeting gRNA
ccaggtggcccacagtctccggg

SEQ ID NO: 1963 - DNA, 23 bp, Artificial Sequence
  HLA-A targeting gRNA
ccagtcccccaagccctgcccgg

SEQ ID NO: 1964 - DNA, 23 bp, Artificial Sequence
  HLA-A targeting gRNA
cccggagactgtgggccacctgg

SEQ ID NO: 1965 - DNA, 23 bp, Artificial Sequence
  HLA-A targeting gRNA
ccgggcagggcttgggggactgg

SEQ ID NO: 1966 - DNA, 23 bp, Artificial Sequence
  HLA-A targeting gRNA
cgggcagggcttgggggactggg

SEQ ID NO: 1967 - DNA, 23 bp, Artificial Sequence
  HLA-A targeting gRNA
cggggccgggcagggcttggggg

SEQ ID NO: 1968 - DNA, 23 bp, Artificial Sequence
  HLA-A targeting gRNA
gccacctggcccgtccgtggggg

SEQ ID NO: 1969 - DNA, 23 bp, Artificial Sequence
  HLA-A targeting gRNA
gccaggtggcccacagtctccgg

SEQ ID NO: 1970 - DNA, 23 bp, Artificial Sequence
  HLA-A targeting gRNA
ggccacctggcccgtccgtgggg

SEQ ID NO: 1971 - DNA, 23 bp, Artificial Sequence
  HLA-A targeting gRNA
gggccacctggcccgtccgtggg

SEQ ID NO: 1972 - DNA, 23 bp, Artificial Sequence
  HLA-A targeting gRNA
ggtcggggccgggcagggcttgg

SEQ ID NO: 1973 - DNA, 23 bp, Artificial Sequence
  HLA-A targeting gRNA
ggtggagaaggggtgaaaggtgg

SEQ ID NO: 1974 - DNA, 23 bp, Artificial Sequence
  HLA-A targeting gRNA
atgaggccactctgaggtgctgg

SEQ ID NO: 1975 - DNA, 23 bp, Artificial Sequence
  HLA-A targeting gRNA
gtcggggccgggcagggcttggg

SEQ ID NO: 1976 - DNA, 23 bp, Artificial Sequence
  HLA-A targeting gRNA
atgatgtatggctgccacgtggg

SEQ ID NO: 1977 - DNA, 23 bp, Artificial Sequence
  HLA-A targeting gRNA
gtggagaaggggtgaaaggtggg

SEQ ID NO: 1978 - DNA, 23 bp, Artificial Sequence
  HLA-A targeting gRNA
tcaggtggagaaggggtgaaagg

SEQ ID NO: 1979 - DNA, 23 bp, Artificial Sequence
  HLA-A targeting gRNA
atgcccacaatggggatggtggg

SEQ ID NO: 1980 - DNA, 23 bp, Artificial Sequence
  HLA-A targeting gRNA
tcccccacggacgggccaggtgg

SEQ ID NO: 1981 - DNA, 23 bp, Artificial Sequence
  HLA-A targeting gRNA
tcggggccgggcagggcttgggg

SEQ ID NO: 1982 - DNA, 23 bp, Artificial Sequence
  HLA-A targeting gRNA
atgcccacgatgtggacggtggg

SEQ ID NO: 1983 - DNA, 23 bp, Artificial Sequence
  HLA-A targeting gRNA
tggagaaggggtgaaaggtgggg

SEQ ID NO: 1984 - DNA, 23 bp, Artificial Sequence
  HLA-A targeting gRNA
tgggccacctggcccgtccgtgg

SEQ ID NO: 1985 - DNA, 23 bp, Artificial Sequence
  HLA-A targeting gRNA
atggccatcctcggcgtctgggg

SEQ ID NO: 1986 - DNA, 23 bp, Artificial Sequence
  HLA-A targeting gRNA
atgggataaggagggagatgggg

SEQ ID NO: 1987 - DNA, 23 bp, Artificial Sequence
  HLA-A targeting gRNA
tgggggactgggctgaccgcggg

SEQ ID NO: 1988 - DNA, 23 bp, Artificial Sequence
  HLA-A targeting gRNA
ttgggggactgggctgaccgcgg

SEQ ID NO: 1989 - DNA, 23 bp, Artificial Sequence
  HLA-A targeting gRNA
cacccagcgcaagtgggagacgg

SEQ ID NO: 1990 - DNA, 23 bp, Artificial Sequence
  HLA-A targeting gRNA
ggccgtctcccacttgcgctggg

SEQ ID NO: 1991 - DNA, 23 bp, Artificial Sequence
  HLA-A targeting gRNA
atgggttaaggagggagatgggg

SEQ ID NO: 1992 - DNA, 23 bp, Artificial Sequence
  HLA-A targeting gRNA
gggccgtctcccacttgcgctgg

SEQ ID NO: 1993 - DNA, 23 bp, Artificial Sequence
  HLA-A targeting gRNA
aggaggaattgtgaggtgggtgg

SEQ ID NO: 1994 - DNA, 23 bp, Artificial Sequence
  HLA-A targeting gRNA
aggtgggtgggctcccccatggg

SEQ ID NO: 1995 - DNA, 23 bp, Artificial Sequence
  HLA-A targeting gRNA
atgtgccctgtctcattcctggg

SEQ ID NO: 1996 - DNA, 23 bp, Artificial Sequence
  HLA-A targeting gRNA
atgtggaggaagaagagctcagg

SEQ ID NO: 1997 - DNA, 23 bp, Artificial Sequence
  HLA-A targeting gRNA
gaggtgggtgggctcccccatgg

SEQ ID NO: 1998 - DNA, 23 bp, Artificial Sequence
  HLA-A targeting gRNA
ggaggaattgtgaggtgggtggg

SEQ ID NO: 1999 - DNA, 23 bp, Artificial Sequence
  HLA-A targeting gRNA
atgttctgtgggatctgaccagg

SEQ ID NO: 2000 - DNA, 23 bp, Artificial Sequence
  HLA-A targeting gRNA
aattatgagcctacccagcctgg

SEQ ID NO: 2001 - DNA, 23 bp, Artificial Sequence
  HLA-A targeting gRNA
attatgagcctacccagcctggg

SEQ ID NO: 2002 - DNA, 23 bp, Artificial Sequence
  HLA-A targeting gRNA
ctcaggtggggaagggatgaagg

SEQ ID NO: 2003 - DNA, 23 bp, Artificial Sequence
  HLA-A targeting gRNA
ctctttggagctgtgatcgctgg

SEQ ID NO: 2004 - DNA, 23 bp, Artificial Sequence
  HLA-A targeting gRNA
attcatatcactcacagtgaggg

SEQ ID NO: 2005 - DNA, 23 bp, Artificial Sequence
  HLA-A targeting gRNA
gctgggtaggctcataattgtgg

SEQ ID NO: 2006 - DNA, 23 bp, Artificial Sequence
  HLA-A targeting gRNA
attcatatctgtcacagtgaggg

SEQ ID NO: 2007 - DNA, 23 bp, Artificial Sequence
  HLA-A targeting gRNA
ggtaggctcataattgtggatgg

SEQ ID NO: 2008 - DNA, 23 bp, Artificial Sequence
  HLA-A targeting gRNA
ggtggggaagggatgaagggtgg

SEQ ID NO: 2009 - DNA, 23 bp, Artificial Sequence
  HLA-A targeting gRNA
gtggggaagggatgaagggtggg

SEQ ID NO: 2010 - DNA, 23 bp, Artificial Sequence
  HLA-A targeting gRNA
tcaggtggggaagggatgaaggg

SEQ ID NO: 2011 - DNA, 23 bp, Artificial Sequence
  HLA-A targeting gRNA
ctctcaactgctccgcctcatgg

SEQ ID NO: 2012 - DNA, 23 bp, Artificial Sequence
  HLA-A targeting gRNA
tctcaactgctccgcctcatggg

SEQ ID NO: 2013 - DNA, 23 bp, Artificial Sequence
  HLA-A targeting gRNA
attgtggttgggagcccatgggg

SEQ ID NO: 2014 - DNA, 23 bp, Artificial Sequence
  HLA-A targeting gRNA
ccatctctgcctcaacttcatgg

SEQ ID NO: 2015 - DNA, 23 bp, Artificial Sequence
  HLA-A targeting gRNA
ccatgaagttgaggcagagatgg

SEQ ID NO: 2016 - DNA, 23 bp, Artificial Sequence
  HLA-A targeting gRNA
ctcagtgcaccatgaagttgagg

SEQ ID NO: 2017 - DNA, 23 bp, Artificial Sequence
  HLA-A targeting gRNA
aatcatgggcctacccagtctgg

SEQ ID NO: 2018 - DNA, 23 bp, Artificial Sequence
  HLA-A targeting gRNA
acacagggcccagactgggtagg

SEQ ID NO: 2019 - DNA, 23 bp, Artificial Sequence
  HLA-A targeting gRNA
actgggtaggcccatgattgtgg

SEQ ID NO: 2020 - DNA, 23 bp, Artificial Sequence
  HLA-A targeting gRNA
agccgcgccgggacgagggtcgg

SEQ ID NO: 2021 - DNA, 23 bp, Artificial Sequence
  HLA-A targeting gRNA
atcatgggcctacccagtctggg

SEQ ID NO: 2022 - DNA, 23 bp, Artificial Sequence
  HLA-A targeting gRNA
ccagccccgaccaacccgggggg

SEQ ID NO: 2023 - DNA, 23 bp, Artificial Sequence
  HLA-A targeting gRNA
atttctacatctccgtgtcccgg

SEQ ID NO: 2024 - DNA, 23 bp, Artificial Sequence
  HLA-A targeting gRNA
ccccccgggttggtcggggctgg

SEQ ID NO: 2025 - DNA, 23 bp, Artificial Sequence
  HLA-A targeting gRNA
cgccgggacgagggtcgggcagg

SEQ ID NO: 2026 - DNA, 23 bp, Artificial Sequence
  HLA-A targeting gRNA
atttcttcacattcgtgtcccgg

SEQ ID NO: 2027 - DNA, 23 bp, Artificial Sequence
  HLA-A targeting gRNA
ctagaggaggaattgtgaggtgg

SEQ ID NO: 2028 - DNA, 23 bp, Artificial Sequence
  HLA-A targeting gRNA
caaaaatccccctggttggtcgg

SEQ ID NO: 2029 - DNA, 23 bp, Artificial Sequence
  HLA-A targeting gRNA
caaaatggccacatgcgtgctgg

SEQ ID NO: 2030 - DNA, 23 bp, Artificial Sequence
  HLA-A targeting gRNA
caaagagaaccaggccagcaagg

SEQ ID NO: 2031 - DNA, 23 bp, Artificial Sequence
  HLA-A targeting gRNA
ctcacctttacaagctgtgaggg

SEQ ID NO: 2032 - DNA, 23 bp, Artificial Sequence
  HLA-A targeting gRNA
ctggcacacagggcccagactgg

SEQ ID NO: 2033 - DNA, 23 bp, Artificial Sequence
  HLA-A targeting gRNA
gaagcaccgtccacaatcatggg

SEQ ID NO: 2034 - DNA, 23 bp, Artificial Sequence
  HLA-A targeting gRNA
gacctgcccgaccctcgtcccgg

SEQ ID NO: 2035 - DNA, 23 bp, Artificial Sequence
  HLA-A targeting gRNA
gagggacacatcagagccctggg

SEQ ID NO: 2036 - DNA, 23 bp, Artificial Sequence
  HLA-A targeting gRNA
gcccgaccctcgtcccggcgcgg

SEQ ID NO: 2037 - DNA, 23 bp, Artificial Sequence
  HLA-A targeting gRNA
gccgcgccgggacgagggtcggg

SEQ ID NO: 2038 - DNA, 23 bp, Artificial Sequence
  HLA-A targeting gRNA
ggaagcaccgtccacaatcatgg

SEQ ID NO: 2039 - DNA, 23 bp, Artificial Sequence
  HLA-A targeting gRNA
ggggagccgcgccgggacgaggg

SEQ ID NO: 2040 - DNA, 23 bp, Artificial Sequence
  HLA-A targeting gRNA
caaggctacgaggttcctctagg

SEQ ID NO: 2041 - DNA, 23 bp, Artificial Sequence
  HLA-A targeting gRNA
gggggagccgcgccgggacgagg

SEQ ID NO: 2042 - DNA, 23 bp, Artificial Sequence
  HLA-A targeting gRNA
ggtaggcccatgattgtggacgg

SEQ ID NO: 2043 - DNA, 23 bp, Artificial Sequence
  HLA-A targeting gRNA
caagtgggaggcggcccatgagg

SEQ ID NO: 2044 - DNA, 23 bp, Artificial Sequence
  HLA-A targeting gRNA
gtgtccctcacagcttgtaaagg

SEQ ID NO: 2045 - DNA, 23 bp, Artificial Sequence
  HLA-A targeting gRNA
tacaggatctggaacccaggagg

SEQ ID NO: 2046 - DNA, 23 bp, Artificial Sequence
  HLA-A targeting gRNA
tagaggaggaattgtgaggtggg

SEQ ID NO: 2047 - DNA, 23 bp, Artificial Sequence
  HLA-A targeting gRNA
tcgtcccggcgcggctcccccgg

SEQ ID NO: 2048 - DNA, 23 bp, Artificial Sequence
  HLA-A targeting gRNA
caagtgggaggcggcccgttggg

SEQ ID NO: 2049 - DNA, 23 bp, Artificial Sequence
  HLA-A targeting gRNA
caagtgggaggcggtccatgcgg

SEQ ID NO: 2050 - DNA, 23 bp, Artificial Sequence
  HLA-A targeting gRNA
tctcacctttacaagctgtgagg

SEQ ID NO: 2051 - DNA, 23 bp, Artificial Sequence
  HLA-A targeting gRNA
caatccatataccgccttcgggg

SEQ ID NO: 2052 - DNA, 23 bp, Artificial Sequence
  HLA-A targeting gRNA
tgagggacacatcagagccctgg

SEQ ID NO: 2053 - DNA, 23 bp, Artificial Sequence
  HLA-A targeting gRNA
cacaagaaagggagacaaatggg

SEQ ID NO: 2054 - DNA, 23 bp, Artificial Sequence
  HLA-A targeting gRNA
tggcacacagggcccagactggg

SEQ ID NO: 2055 - DNA, 23 bp, Artificial Sequence
  HLA-A targeting gRNA
tggctagaggaggaattgtgagg

SEQ ID NO: 2056 - DNA, 23 bp, Artificial Sequence
  HLA-A targeting gRNA
tggtacaggatctggaacccagg

SEQ ID NO: 2057 - DNA, 23 bp, Artificial Sequence
  HLA-A targeting gRNA
cacaatggggatggtgggctggg

SEQ ID NO: 2058 - DNA, 23 bp, Artificial Sequence
  HLA-A targeting gRNA
cgccgtggatagagcaggagagg

SEQ ID NO: 2059 - DNA, 23 bp, Artificial Sequence
  HLA-A targeting gRNA
actccacgcacgtgccatccagg

SEQ ID NO: 2060 - DNA, 23 bp, Artificial Sequence
  HLA-A targeting gRNA
cacacaccggcggcagccttggg

SEQ ID NO: 2061 - DNA, 23 bp, Artificial Sequence
  HLA-A targeting gRNA
cacacagggcccaggctgggtgg

SEQ ID NO: 2062 - DNA, 23 bp, Artificial Sequence
  HLA-A targeting gRNA
cacgcacgtgccatccaggtagg

SEQ ID NO: 2063 - DNA, 23 bp, Artificial Sequence
  HLA-A targeting gRNA
ctacctggatggcacgtgcgtgg

SEQ ID NO: 2064 - DNA, 23 bp, Artificial Sequence
  HLA-A targeting gRNA
tggatggcacgtgcgtggagtgg

SEQ ID NO: 2065 - DNA, 23 bp, Artificial Sequence
  HLA-A targeting gRNA
gcaggacgcttacgacggcaagg

SEQ ID NO: 2066 - DNA, 23 bp, Artificial Sequence
  HLA-A targeting gRNA
agcaggagaggcctgagtattgg

SEQ ID NO: 2067 - DNA, 23 bp, Artificial Sequence
  HLA-A targeting gRNA
cacactgaccgagtggacctggg

SEQ ID NO: 2068 - DNA, 23 bp, Artificial Sequence
  HLA-A targeting gRNA
gaggcctgagtattgggaccagg

SEQ ID NO: 2069 - DNA, 23 bp, Artificial Sequence
  HLA-A targeting gRNA
cacagcatccagaggatgtatgg

SEQ ID NO: 2070 - DNA, 23 bp, Artificial Sequence
  HLA-A targeting gRNA
gcaggagaggcctgagtattggg

SEQ ID NO: 2071 - DNA, 23 bp, Artificial Sequence
  HLA-A targeting gRNA
ggcctctcctgctctatccacgg

SEQ ID NO: 2072 - DNA, 23 bp, Artificial Sequence
  HLA-A targeting gRNA
gtctcctggtcccaatactcagg

SEQ ID NO: 2073 - DNA, 23 bp, Artificial Sequence
  HLA-A targeting gRNA
cacaggtaccaggggccacgggg

SEQ ID NO: 2074 - DNA, 23 bp, Artificial Sequence
  HLA-A targeting gRNA
cacatcgtgggcatcattgctgg

SEQ ID NO: 2075 - DNA, 23 bp, Artificial Sequence
  HLA-A targeting gRNA
catgtaggcataatgtgaggagg

SEQ ID NO: 2076 - DNA, 23 bp, Artificial Sequence
  HLA-A targeting gRNA
cacccaataggagtgagaactgg

SEQ ID NO: 2077 - DNA, 23 bp, Artificial Sequence
  HLA-A targeting gRNA
cacccaattggagtgagaactgg

SEQ ID NO: 2078 - DNA, 23 bp, Artificial Sequence
  HLA-A targeting gRNA
agctgtgatcgctggagctgtgg

SEQ ID NO: 2079 - DNA, 23 bp, Artificial Sequence
  HLA-A targeting gRNA
aaagcccgcacgcacccaccggg

SEQ ID NO: 2080 - DNA, 23 bp, Artificial Sequence
  HLA-A targeting gRNA
cccggccgggggcgcaggtcagg

SEQ ID NO: 2081 - DNA, 23 bp, Artificial Sequence
  HLA-A targeting gRNA
cacccgccctggtctgggtcagg

SEQ ID NO: 2082 - DNA, 23 bp, Artificial Sequence
  HLA-A targeting gRNA
caccctccctctgctcctgaggg

SEQ ID NO: 2083 - DNA, 23 bp, Artificial Sequence
  HLA-A targeting gRNA
cctgacctgcgcccccggccggg

SEQ ID NO: 2084 - DNA, 23 bp, Artificial Sequence
  HLA-A targeting gRNA
caccctgagatgggataaggagg

SEQ ID NO: 2085 - DNA, 23 bp, Artificial Sequence
  HLA-A targeting gRNA
ctgacctgcgcccccggccgggg

SEQ ID NO: 2086 - DNA, 23 bp, Artificial Sequence
  HLA-A targeting gRNA
caccctgagatgggttaaggagg

SEQ ID NO: 2087 - DNA, 23 bp, Artificial Sequence
  HLA-A targeting gRNA
gagtcccggtgggtgcgtgcggg

SEQ ID NO: 2088 - DNA, 23 bp, Artificial Sequence
  HLA-A targeting gRNA
caccgagcgcaagtgggaggcgg

SEQ ID NO: 2089 - DNA, 23 bp, Artificial Sequence
  HLA-A targeting gRNA
caccggccggggtcactcaccgg

SEQ ID NO: 2090 - DNA, 23 bp, Artificial Sequence
  HLA-A targeting gRNA
caccgtggatagagcaggagagg

SEQ ID NO: 2091 - DNA, 23 bp, Artificial Sequence
  HLA-A targeting gRNA
ggggtcctgacctgcgcccccgg

SEQ ID NO: 2092 - DNA, 23 bp, Artificial Sequence
  HLA-A targeting gRNA
taaagcccgcacgcacccaccgg

SEQ ID NO: 2093 - DNA, 23 bp, Artificial Sequence
  HLA-A targeting gRNA
tcctgacctgcgcccccggccgg

SEQ ID NO: 2094 - DNA, 23 bp, Artificial Sequence
  HLA-A targeting gRNA
acatgaacacagacacatgcagg

SEQ ID NO: 2095 - DNA, 23 bp, Artificial Sequence
  HLA-A targeting gRNA
gcatgtgtctgtgttcatgtagg

SEQ ID NO: 2096 - DNA, 23 bp, Artificial Sequence
  HLA-A targeting gRNA
gttcatgtaggcataatgtgagg

SEQ ID NO: 2097 - DNA, 23 bp, Artificial Sequence
  HLA-A targeting gRNA
cacagccacccacttctggaagg

SEQ ID NO: 2098 - DNA, 23 bp, Artificial Sequence
  HLA-A targeting gRNA
cacgagtaccaggggccacgggg

SEQ ID NO: 2099 - DNA, 23 bp, Artificial Sequence
  HLA-A targeting gRNA
ccaccacagccacccacttctgg

SEQ ID NO: 2100 - DNA, 23 bp, Artificial Sequence
  HLA-A targeting gRNA
ccagaagtgggtggctgtggtgg

SEQ ID NO: 2101 - DNA, 23 bp, Artificial Sequence
  HLA-A targeting gRNA
cacgatgtggacggtgggctggg

SEQ ID NO: 2102 - DNA, 23 bp, Artificial Sequence
  HLA-A targeting gRNA
cttccagaagtgggtggctgtgg

SEQ ID NO: 2103 - DNA, 23 bp, Artificial Sequence
  HLA-A targeting gRNA
gtggctgtggtggtgccttctgg

SEQ ID NO: 2104 - DNA, 23 bp, Artificial Sequence
  HLA-A targeting gRNA
tggaaccttccagaagtgggtgg

SEQ ID NO: 2105 - DNA, 23 bp, Artificial Sequence
  HLA-A targeting gRNA
tcaggacccctcatcccccacgg

SEQ ID NO: 2106 - DNA, 23 bp, Artificial Sequence
  HLA-A targeting gRNA
cacgggcccaaggctgccgccgg

SEQ ID NO: 2107 - DNA, 23 bp, Artificial Sequence
  HLA-A targeting gRNA
cacgggtaccagggaccacgggg

SEQ ID NO: 2108 - DNA, 23 bp, Artificial Sequence
  HLA-A targeting gRNA
aatgatgcccacgatggggacgg

SEQ ID NO: 2109 - DNA, 23 bp, Artificial Sequence
  HLA-A targeting gRNA
atgcccacgatggggacggtggg

SEQ ID NO: 2110 - DNA, 23 bp, Artificial Sequence
  HLA-A targeting gRNA
cacgatggggacggtgggctggg

SEQ ID NO: 2111 - DNA, 23 bp, Artificial Sequence
  HLA-A targeting gRNA
cagcccaccgtccccatcgtggg

SEQ ID NO: 2112 - DNA, 23 bp, Artificial Sequence
  HLA-A targeting gRNA
ccacgatggggacggtgggctgg

SEQ ID NO: 2113 - DNA, 23 bp, Artificial Sequence
  HLA-A targeting gRNA
cactcggtcagtgtgtgactggg

SEQ ID NO: 2114 - DNA, 23 bp, Artificial Sequence
  HLA-A targeting gRNA
ccagcccaccgtccccatcgtgg

SEQ ID NO: 2115 - DNA, 23 bp, Artificial Sequence
  HLA-A targeting gRNA
gatgcccacgatggggacggtgg

SEQ ID NO: 2116 - DNA, 23 bp, Artificial Sequence
  HLA-A targeting gRNA
cactctgaggtgctgggccctgg

SEQ ID NO: 2117 - DNA, 23 bp, Artificial Sequence
  HLA-A targeting gRNA
cactgacctgacagcgggatggg

SEQ ID NO: 2118 - DNA, 23 bp, Artificial Sequence
  HLA-A targeting gRNA
cactgacctggcagcgggatagg

SEQ ID NO: 2119 - DNA, 23 bp, Artificial Sequence
  HLA-A targeting gRNA
gggacggtgggctgggaagatgg

SEQ ID NO: 2120 - DNA, 23 bp, Artificial Sequence
  HLA-A targeting gRNA
cccgggctggggtcactcaccgg

SEQ ID NO: 2121 - DNA, 23 bp, Artificial Sequence
  HLA-A targeting gRNA
cactggtaccaggggccacgggg

SEQ ID NO: 2122 - DNA, 23 bp, Artificial Sequence
  HLA-A targeting gRNA
ccggtgagtgaccccagcccggg

SEQ ID NO: 2123 - DNA, 23 bp, Artificial Sequence
  HLA-A targeting gRNA
cagaccagggcgggtgagtgcgg

SEQ ID NO: 2124 - DNA, 23 bp, Artificial Sequence
  HLA-A targeting gRNA
cggtgagtgaccccagcccgggg

SEQ ID NO: 2125 - DNA, 23 bp, Artificial Sequence
  HLA-A targeting gRNA
cgtgacctgcgccccgggctggg

SEQ ID NO: 2126 - DNA, 23 bp, Artificial Sequence
  HLA-A targeting gRNA
cagactaaccgagcgaacctggg

SEQ ID NO: 2127 - DNA, 23 bp, Artificial Sequence
  HLA-A targeting gRNA
gccggtgagtgaccccagcccgg

SEQ ID NO: 2128 - DNA, 23 bp, Artificial Sequence
  HLA-A targeting gRNA
gtgaccccagcccggggcgcagg

SEQ ID NO: 2129 - DNA, 23 bp, Artificial Sequence
  HLA-A targeting gRNA
cagactgaccgagagaactgcgg

SEQ ID NO: 2130 - DNA, 23 bp, Artificial Sequence
  HLA-A targeting gRNA
gtgacctgcgccccgggctgggg

SEQ ID NO: 2131 - DNA, 23 bp, Artificial Sequence
  HLA-A targeting gRNA
tcgtgacctgcgccccgggctgg

SEQ ID NO: 2132 - DNA, 23 bp, Artificial Sequence
  HLA-A targeting gRNA
cagagcgaggacggtgaccccgg

SEQ ID NO: 2133 - DNA, 23 bp, Artificial Sequence
  HLA-A targeting gRNA
aatgtgtgttgggtgttgggcgg

SEQ ID NO: 2134 - DNA, 23 bp, Artificial Sequence
  HLA-A targeting gRNA
cagatacctgaagaacgggaagg

SEQ ID NO: 2135 - DNA, 23 bp, Artificial Sequence
  HLA-A targeting gRNA
ctctctgctgctccgccacatgg

SEQ ID NO: 2136 - DNA, 23 bp, Artificial Sequence
  HLA-A targeting gRNA
cagatacctggagaacggtaagg

SEQ ID NO: 2137 - DNA, 23 bp, Artificial Sequence
  HLA-A targeting gRNA
tctctgctgctccgccacatggg

SEQ ID NO: 2138 - DNA, 23 bp, Artificial Sequence
  HLA-A targeting gRNA
acacagctccaaagagaactagg

SEQ ID NO: 2139 - DNA, 23 bp, Artificial Sequence
  HLA-A targeting gRNA
accacatccgtgtcccggcccgg

SEQ ID NO: 2140 - DNA, 23 bp, Artificial Sequence
  HLA-A targeting gRNA
agctgtgttcgctggagctgtgg

SEQ ID NO: 2141 - DNA, 23 bp, Artificial Sequence
  HLA-A targeting gRNA
atgggggtgtcatgtcttttagg

SEQ ID NO: 2142 - DNA, 23 bp, Artificial Sequence
  HLA-A targeting gRNA
cagcaaggatgcccacgatgggg

SEQ ID NO: 2143 - DNA, 23 bp, Artificial Sequence
  HLA-A targeting gRNA
cagcaatgatgcccacaatgggg

SEQ ID NO: 2144 - DNA, 23 bp, Artificial Sequence
  HLA-A targeting gRNA
atttcaccacatccgtgtcccgg

SEQ ID NO: 2145 - DNA, 23 bp, Artificial Sequence
  HLA-A targeting gRNA
cagcaatgatgcccacgatgtgg

SEQ ID NO: 2146 - DNA, 23 bp, Artificial Sequence
  HLA-A targeting gRNA
ctctttggagctgtgttcgctgg

SEQ ID NO: 2147 - DNA, 23 bp, Artificial Sequence
  HLA-A targeting gRNA
ggatgtggtgaaatacctcatgg

SEQ ID NO: 2148 - DNA, 23 bp, Artificial Sequence
  HLA-A targeting gRNA
cagccattttgcatctgtcatgg

SEQ ID NO: 2149 - DNA, 23 bp, Artificial Sequence
  HLA-A targeting gRNA
ggtgaaatacctcatggagtggg

SEQ ID NO: 2150 - DNA, 23 bp, Artificial Sequence
  HLA-A targeting gRNA
cagcccaccatccccattgtggg

SEQ ID NO: 2151 - DNA, 23 bp, Artificial Sequence
  HLA-A targeting gRNA
cagcccaccgtccacatcgtggg

SEQ ID NO: 2152 - DNA, 23 bp, Artificial Sequence
  HLA-A targeting gRNA
tgggggtgtcatgtcttttaggg

SEQ ID NO: 2153 - DNA, 23 bp, Artificial Sequence
  HLA-A targeting gRNA
tggtgaaatacctcatggagtgg

SEQ ID NO: 2154 - DNA, 23 bp, Artificial Sequence
  HLA-A targeting gRNA
ccccggccggggtcactcaccgg

SEQ ID NO: 2155 - DNA, 23 bp, Artificial Sequence
  HLA-A targeting gRNA
ccggtgagtgaccccggccgggg

SEQ ID NO: 2156 - DNA, 23 bp, Artificial Sequence
  HLA-A targeting gRNA
cggtgagtgaccccggccggggg

SEQ ID NO: 2157 - DNA, 23 bp, Artificial Sequence
  HLA-A targeting gRNA
cagcggagagtctacctggaggg

SEQ ID NO: 2158 - DNA, 23 bp, Artificial Sequence
  HLA-A targeting gRNA
gccggtgagtgaccccggccggg

SEQ ID NO: 2159 - DNA, 23 bp, Artificial Sequence
  HLA-A targeting gRNA
cagctgagagcctacctggatgg

SEQ ID NO: 2160 - DNA, 23 bp, Artificial Sequence
  HLA-A targeting gRNA
gtgaccccggccgggggcgcagg

SEQ ID NO: 2161 - DNA, 23 bp, Artificial Sequence
  HLA-A targeting gRNA
ctgggcggggctcgggggactgg

SEQ ID NO: 2162 - DNA, 23 bp, Artificial Sequence
  HLA-A targeting gRNA
tgggcggggctcgggggactggg

SEQ ID NO: 2163 - DNA, 23 bp, Artificial Sequence
  HLA-A targeting gRNA
aagtcgctgttccctcctcaggg

SEQ ID NO: 2164 - DNA, 23 bp, Artificial Sequence
  HLA-A targeting gRNA
acactccaccagcatgcatgtgg

SEQ ID NO: 2165 - DNA, 23 bp, Artificial Sequence
  HLA-A targeting gRNA
gaagtcgctgttccctcctcagg

SEQ ID NO: 2166 - DNA, 23 bp, Artificial Sequence
  HLA-A targeting gRNA
gaggagggaacagcgacttctgg

SEQ ID NO: 2167 - DNA, 23 bp, Artificial Sequence
  HLA-A targeting gRNA
gatggccacatgcatgctggtgg

SEQ ID NO: 2168 - DNA, 23 bp, Artificial Sequence
  HLA-A targeting gRNA
ggccggtgagtgaccccggccgg

SEQ ID NO: 2169 - DNA, 23 bp, Artificial Sequence
  HLA-A targeting gRNA
actctgagatgctgggccctggg

SEQ ID NO: 2170 - DNA, 23 bp, Artificial Sequence
  HLA-A targeting gRNA
agcatctcagagtggcctcatgg

SEQ ID NO: 2171 - DNA, 23 bp, Artificial Sequence
  HLA-A targeting gRNA
caggccccgaaggcggtatatgg

SEQ ID NO: 2172 - DNA, 23 bp, Artificial Sequence
  HLA-A targeting gRNA
atgaggccactctgagatgctgg

SEQ ID NO: 2173 - DNA, 23 bp, Artificial Sequence
  HLA-A targeting gRNA
cactctgagatgctgggccctgg

SEQ ID NO: 2174 - DNA, 23 bp, Artificial Sequence
  HLA-A targeting gRNA
cagggcccagcatctcagagtgg

SEQ ID NO: 2175 - DNA, 23 bp, Artificial Sequence
  HLA-A targeting gRNA
cagggcccagcacctcagagtgg

SEQ ID NO: 2176 - DNA, 23 bp, Artificial Sequence
  HLA-A targeting gRNA
tgaggccactctgagatgctggg

SEQ ID NO: 2177 - DNA, 23 bp, Artificial Sequence
  HLA-A targeting gRNA
cggcccgtccgtgggggatgagg

SEQ ID NO: 2178 - DNA, 23 bp, Artificial Sequence
  HLA-A targeting gRNA
cagggtttttcaagtcacaaagg

SEQ ID NO: 2179 - DNA, 23 bp, Artificial Sequence
  HLA-A targeting gRNA
caggtcagtgtgatctccacagg

SEQ ID NO: 2180 - DNA, 23 bp, Artificial Sequence
  HLA-A targeting gRNA
caggtcagtgtgatctctgcagg

SEQ ID NO: 2181 - DNA, 23 bp, Artificial Sequence
  HLA-A targeting gRNA
cgtccacgcacgtgccctccagg

SEQ ID NO: 2182 - DNA, 23 bp, Artificial Sequence
  HLA-A targeting gRNA
ctggagggcacgtgcgtggacgg

SEQ ID NO: 2183 - DNA, 23 bp, Artificial Sequence
  HLA-A targeting gRNA
caggttctcacagcatccagagg

SEQ ID NO: 2184 - DNA, 23 bp, Artificial Sequence
  HLA-A targeting gRNA
tggagggcacgtgcgtggacggg

SEQ ID NO: 2185 - DNA, 23 bp, Artificial Sequence
  HLA-A targeting gRNA
acctaatgtgtgttgggtgttgg

SEQ ID NO: 2186 - DNA, 23 bp, Artificial Sequence
  HLA-A targeting gRNA
cccaacacccaacacacattagg

SEQ ID NO: 2187 - DNA, 23 bp, Artificial Sequence
  HLA-A targeting gRNA
cccagccccgaccaacccggggg

SEQ ID NO: 2188 - DNA, 23 bp, Artificial Sequence
  HLA-A targeting gRNA
cccccgggttggtcggggctggg

SEQ ID NO: 2189 - DNA, 23 bp, Artificial Sequence
  HLA-A targeting gRNA
ccgcccagccccgaccaacccgg

SEQ ID NO: 2190 - DNA, 23 bp, Artificial Sequence
  HLA-A targeting gRNA
cagttgagagcctacctggatgg

SEQ ID NO: 2191 - DNA, 23 bp, Artificial Sequence
  HLA-A targeting gRNA
ccgggttggtcggggctgggcgg

SEQ ID NO: 2192 - DNA, 23 bp, Artificial Sequence
  HLA-A targeting gRNA
cctaatgtgtgttgggtgttggg

SEQ ID NO: 2193 - DNA, 23 bp, Artificial Sequence
  HLA-A targeting gRNA
catctcagggtgaggggctcggg

SEQ ID NO: 2194 - DNA, 23 bp, Artificial Sequence
  HLA-A targeting gRNA
cgcccagccccgaccaacccggg

SEQ ID NO: 2195 - DNA, 23 bp, Artificial Sequence
  HLA-A targeting gRNA
cggggctgggcggggctcggggg

SEQ ID NO: 2196 - DNA, 23 bp, Artificial Sequence
  HLA-A targeting gRNA
cgggttggtcggggctgggcggg

SEQ ID NO: 2197 - DNA, 23 bp, Artificial Sequence
  HLA-A targeting gRNA
cttctcacagatagaaaaggagg

SEQ ID NO: 2198 - DNA, 23 bp, Artificial Sequence
  HLA-A targeting gRNA
gcccagccccgaccaacccgggg

SEQ ID NO: 2199 - DNA, 23 bp, Artificial Sequence
  HLA-A targeting gRNA
gggttggtcggggctgggcgggg

SEQ ID NO: 2200 - DNA, 23 bp, Artificial Sequence
  HLA-A targeting gRNA
ggtcggggctgggcggggctcgg

SEQ ID NO: 2201 - DNA, 23 bp, Artificial Sequence
  HLA-A targeting gRNA
gtcggggctgggcggggctcggg

SEQ ID NO: 2202 - DNA, 23 bp, Artificial Sequence
  HLA-A targeting gRNA
tcggggctgggcggggctcgggg

SEQ ID NO: 2203 - DNA, 23 bp, Artificial Sequence
  HLA-A targeting gRNA
catttgtctccctttcttgtggg

SEQ ID NO: 2204 - DNA, 23 bp, Artificial Sequence
  HLA-A targeting gRNA
tggaggacctaatgtgtgttggg

SEQ ID NO: 2205 - DNA, 23 bp, Artificial Sequence
  HLA-A targeting gRNA
ttctcacagatagaaaaggaggg

SEQ ID NO: 2206 - DNA, 23 bp, Artificial Sequence
  HLA-A targeting gRNA
ccaatccatataccgccttcggg

SEQ ID NO: 2207 - DNA, 23 bp, Artificial Sequence
  HLA-A targeting gRNA
ttggaggacctaatgtgtgttgg

SEQ ID NO: 2208 - DNA, 23 bp, Artificial Sequence
  HLA-A targeting gRNA
ccacaagaaagggagacaaatgg

SEQ ID NO: 2209 - DNA, 23 bp, Artificial Sequence
  HLA-A targeting gRNA
tttcttctcacagatagaaaagg

SEQ ID NO: 2210 - DNA, 23 bp, Artificial Sequence
  HLA-A targeting gRNA
ccacaatggggatggtgggctgg

SEQ ID NO: 2211 - DNA, 23 bp, Artificial Sequence
  HLA-A targeting gRNA
aaccagtcatcagtattcgaggg

SEQ ID NO: 2212 - DNA, 23 bp, Artificial Sequence
  HLA-A targeting gRNA
aatcttctattccctgaggaggg

SEQ ID NO: 2213 - DNA, 23 bp, Artificial Sequence
  HLA-A targeting gRNA
acagatctcaggagggcgattgg

SEQ ID NO: 2214 - DNA, 23 bp, Artificial Sequence
  HLA-A targeting gRNA
acttcatatctgtcacagtgagg

SEQ ID NO: 2215 - DNA, 23 bp, Artificial Sequence
  HLA-A targeting gRNA
agacctacaggcgatcaggtagg

SEQ ID NO: 2216 - DNA, 23 bp, Artificial Sequence
  HLA-A targeting gRNA
aggaacagctcaggtggagaagg

SEQ ID NO: 2217 - DNA, 23 bp, Artificial Sequence
  HLA-A targeting gRNA
atccctcgaatactgatgactgg

SEQ ID NO: 2218 - DNA, 23 bp, Artificial Sequence
  HLA-A targeting gRNA
ccacgatgtggacggtgggctgg

SEQ ID NO: 2219 - DNA, 23 bp, Artificial Sequence
  HLA-A targeting gRNA
atgatgtttggctgcgacgtggg

SEQ ID NO: 2220 - DNA, 23 bp, Artificial Sequence
  HLA-A targeting gRNA
atgtggaggaggaacagctcagg

SEQ ID NO: 2221 - DNA, 23 bp, Artificial Sequence
  HLA-A targeting gRNA
caagatggccacatgcatgctgg

SEQ ID NO: 2222 - DNA, 23 bp, Artificial Sequence
  HLA-A targeting gRNA
cacaccctccagatgatgtttgg

SEQ ID NO: 2223 - DNA, 23 bp, Artificial Sequence
  HLA-A targeting gRNA
cacggtcccaaggctgctgccgg

SEQ ID NO: 2224 - DNA, 23 bp, Artificial Sequence
  HLA-A targeting gRNA
ccctcctgagatctgtcgtcagg

SEQ ID NO: 2225 - DNA, 23 bp, Artificial Sequence
  HLA-A targeting gRNA
ccctgacgacagatctcaggagg

SEQ ID NO: 2226 - DNA, 23 bp, Artificial Sequence
  HLA-A targeting gRNA
ccactcggtcagtgtgtgactgg

SEQ ID NO: 2227 - DNA, 23 bp, Artificial Sequence
  HLA-A targeting gRNA
cctcctgagatctgtcgtcaggg

SEQ ID NO: 2228 - DNA, 23 bp, Artificial Sequence
  HLA-A targeting gRNA
ccactgctccgcctcatgggcgg

SEQ ID NO: 2229 - DNA, 23 bp, Artificial Sequence
  HLA-A targeting gRNA
cctgacgacagatctcaggaggg

SEQ ID NO: 2230 - DNA, 23 bp, Artificial Sequence
  HLA-A targeting gRNA
cgcagccaaacatcatctggagg

SEQ ID NO: 2231 - DNA, 23 bp, Artificial Sequence
  HLA-A targeting gRNA
cgcctgtaggtctcccgggctgg

SEQ ID NO: 2232 - DNA, 23 bp, Artificial Sequence
  HLA-A targeting gRNA
cgggagacctacaggcgatcagg

SEQ ID NO: 2233 - DNA, 23 bp, Artificial Sequence
  HLA-A targeting gRNA
cgtcgcagccaaacatcatctgg

SEQ ID NO: 2234 - DNA, 23 bp, Artificial Sequence
  HLA-A targeting gRNA
ctgaaaatgaaaccgggttaagg

SEQ ID NO: 2235 - DNA, 23 bp, Artificial Sequence
  HLA-A targeting gRNA
ccagcaaggatgcccacgatggg

SEQ ID NO: 2236 - DNA, 23 bp, Artificial Sequence
  HLA-A targeting gRNA
ccagcaatgatgcccacaatggg

SEQ ID NO: 2237 - DNA, 23 bp, Artificial Sequence
  HLA-A targeting gRNA
ctgatcgcctgtaggtctcccgg

SEQ ID NO: 2238 - DNA, 23 bp, Artificial Sequence
  HLA-A targeting gRNA
cttcatatctgtcacagtgaggg

SEQ ID NO: 2239 - DNA, 23 bp, Artificial Sequence
  HLA-A targeting gRNA
gaaaccgggttaaggcgcctggg

SEQ ID NO: 2240 - DNA, 23 bp, Artificial Sequence
  HLA-A targeting gRNA
ccagcccaccatccccattgtgg

SEQ ID NO: 2241 - DNA, 23 bp, Artificial Sequence
  HLA-A targeting gRNA
ccagcccaccgtccacatcgtgg

SEQ ID NO: 2242 - DNA, 23 bp, Artificial Sequence
  HLA-A targeting gRNA
gaacagctcaggtggagaagggg

SEQ ID NO: 2243 - DNA, 23 bp, Artificial Sequence
  HLA-A targeting gRNA
gaaccagtcatcagtattcgagg

SEQ ID NO: 2244 - DNA, 23 bp, Artificial Sequence
  HLA-A targeting gRNA
gaggaaaagtcacggtcccaagg

SEQ ID NO: 2245 - DNA, 23 bp, Artificial Sequence
  HLA-A targeting gRNA
gaggcccaggcgccttaacccgg

SEQ ID NO: 2246 - DNA, 23 bp, Artificial Sequence
  HLA-A targeting gRNA
ccaggacacggagctcgtggagg

SEQ ID NO: 2247 - DNA, 23 bp, Artificial Sequence
  HLA-A targeting gRNA
ccaggagacacggaatatgaagg

SEQ ID NO: 2248 - DNA, 23 bp, Artificial Sequence
  HLA-A targeting gRNA
gatgatgtttggctgcgacgtgg

SEQ ID NO: 2249 - DNA, 23 bp, Artificial Sequence
  HLA-A targeting gRNA
ccaggagacgcggaatgtgaagg

SEQ ID NO: 2250 - DNA, 23 bp, Artificial Sequence
  HLA-A targeting gRNA
gcagccaaacatcatctggaggg

SEQ ID NO: 2251 - DNA, 23 bp, Artificial Sequence
  HLA-A targeting gRNA
gcagctgtggtggtaccttctgg

SEQ ID NO: 2252 - DNA, 23 bp, Artificial Sequence
  HLA-A targeting gRNA
gcgatcaggtaggcgccccgtgg

SEQ ID NO: 2253 - DNA, 23 bp, Artificial Sequence
  HLA-A targeting gRNA
gcgcctacctgatcgcctgtagg

SEQ ID NO: 2254 - DNA, 23 bp, Artificial Sequence
  HLA-A targeting gRNA
ggaacagctcaggtggagaaggg

SEQ ID NO: 2255 - DNA, 23 bp, Artificial Sequence
  HLA-A targeting gRNA
ggaccgtgacttttcctctcagg

SEQ ID NO: 2256 - DNA, 23 bp, Artificial Sequence
  HLA-A targeting gRNA
ggataatcttctattccctgagg

SEQ ID NO: 2257 - DNA, 23 bp, Artificial Sequence
  HLA-A targeting gRNA
ggccagcccgggagacctacagg

SEQ ID NO: 2258 - DNA, 23 bp, Artificial Sequence
  HLA-A targeting gRNA
ggggtggttgagctcccccatgg

SEQ ID NO: 2259 - DNA, 23 bp, Artificial Sequence
  HLA-A targeting gRNA
gggtggttgagctcccccatggg

SEQ ID NO: 2260 - DNA, 23 bp, Artificial Sequence
  HLA-A targeting gRNA
ggtaggcgccccgtggcccctgg

SEQ ID NO: 2261 - DNA, 23 bp, Artificial Sequence
  HLA-A targeting gRNA
ggtccctgacgacagatctcagg

SEQ ID NO: 2262 - DNA, 23 bp, Artificial Sequence
  HLA-A targeting gRNA
ccagtcacacactgaccgagtgg

SEQ ID NO: 2263 - DNA, 23 bp, Artificial Sequence
  HLA-A targeting gRNA
ggtcggcccatgattgtggatgg

SEQ ID NO: 2264 - DNA, 23 bp, Artificial Sequence
  HLA-A targeting gRNA
taaaatctctgacggaatgacgg

SEQ ID NO: 2265 - DNA, 23 bp, Artificial Sequence
  HLA-A targeting gRNA
taaggcgcctgggcctctcccgg

SEQ ID NO: 2266 - DNA, 23 bp, Artificial Sequence
  HLA-A targeting gRNA
taatcttctattccctgaggagg

SEQ ID NO: 2267 - DNA, 23 bp, Artificial Sequence
  HLA-A targeting gRNA
tgaaaccgggttaaggcgcctgg

SEQ ID NO: 2268 - DNA, 23 bp, Artificial Sequence
  HLA-A targeting gRNA
ccatctcagggtgaggggctcgg

SEQ ID NO: 2269 - DNA, 23 bp, Artificial Sequence
  HLA-A targeting gRNA
tgactggttccctttgacaccgg

SEQ ID NO: 2270 - DNA, 23 bp, Artificial Sequence
  HLA-A targeting gRNA
tgatcgcctgtaggtctcccggg

SEQ ID NO: 2271 - DNA, 23 bp, Artificial Sequence
  HLA-A targeting gRNA
tgatgtttggctgcgacgtgggg

SEQ ID NO: 2272 - DNA, 23 bp, Artificial Sequence
  HLA-A targeting gRNA
tggaggaggaacagctcaggtgg

SEQ ID NO: 2273 - DNA, 23 bp, Artificial Sequence
  HLA-A targeting gRNA
tgtggtggtaccttctggagagg

SEQ ID NO: 2274 - DNA, 23 bp, Artificial Sequence
  HLA-A targeting gRNA
ttaagggataaaatctctgacgg

SEQ ID NO: 2275 - DNA, 23 bp, Artificial Sequence
  HLA-A targeting gRNA
ccatttgtctccctttcttgtgg

SEQ ID NO: 2276 - DNA, 23 bp, Artificial Sequence
  HLA-A targeting gRNA
aaacatgaagaaagcagatgtgg

SEQ ID NO: 2277 - DNA, 23 bp, Artificial Sequence
  HLA-A targeting gRNA
aacatgaagaaagcagatgtggg

SEQ ID NO: 2278 - DNA, 23 bp, Artificial Sequence
  HLA-A targeting gRNA
aagaaagcagatgtgggccctgg

SEQ ID NO: 2279 - DNA, 23 bp, Artificial Sequence
  HLA-A targeting gRNA
cccaatccatataccgccttcgg

SEQ ID NO: 2280 - DNA, 23 bp, Artificial Sequence
  HLA-A targeting gRNA
cccacagaacatgtggctagagg

SEQ ID NO: 2281 - DNA, 23 bp, Artificial Sequence
  HLA-A targeting gRNA
cccatcgtgggcatccttgctgg

SEQ ID NO: 2282 - DNA, 23 bp, Artificial Sequence
  HLA-A targeting gRNA
cccattgtgggcatcattgctgg

SEQ ID NO: 2283 - DNA, 23 bp, Artificial Sequence
  HLA-A targeting gRNA
ccccaggctcccaatccatgagg

SEQ ID NO: 2284 - DNA, 23 bp, Artificial Sequence
  HLA-A targeting gRNA
ccccaggctcctactccatgagg

SEQ ID NO: 2285 - DNA, 23 bp, Artificial Sequence
  HLA-A targeting gRNA
ctcaggagggcgattggtccagg

SEQ ID NO: 2286 - DNA, 23 bp, Artificial Sequence
  HLA-A targeting gRNA
ccccccgggtgggtcggggcggg

SEQ ID NO: 2287 - DNA, 23 bp, Artificial Sequence
  HLA-A targeting gRNA
tcaggagggcgattggtccaggg

SEQ ID NO: 2288 - DNA, 23 bp, Artificial Sequence
  HLA-A targeting gRNA
ttcatatctgtcacagtgagggg

SEQ ID NO: 2289 - DNA, 23 bp, Artificial Sequence
  HLA-A targeting gRNA
cccccgggtgggtcggggcgggg

SEQ ID NO: 2290 - DNA, 23 bp, Artificial Sequence
  HLA-A targeting gRNA
ccccctggttggtcggggccggg

SEQ ID NO: 2291 - DNA, 23 bp, Artificial Sequence
  HLA-A targeting gRNA
ccccgaccccgcggtcagcccgg

SEQ ID NO: 2292 - DNA, 23 bp, Artificial Sequence
  HLA-A targeting gRNA
ccccgccccgacccacccggggg

SEQ ID NO: 2293 - DNA, 23 bp, Artificial Sequence
  HLA-A targeting gRNA
cccgaaggcggtatatggattgg

SEQ ID NO: 2294 - DNA, 23 bp, Artificial Sequence
  HLA-A targeting gRNA
agactgaccgagagaacctgcgg

SEQ ID NO: 2295 - DNA, 23 bp, Artificial Sequence
  HLA-A targeting gRNA
cgccgggaggagggtcgggcagg

SEQ ID NO: 2296 - DNA, 23 bp, Artificial Sequence
  HLA-A targeting gRNA
gacctgcccgaccctcctcccgg

SEQ ID NO: 2297 - DNA, 23 bp, Artificial Sequence
  HLA-A targeting gRNA
cccgccccgacccacccgggggg

SEQ ID NO: 2298 - DNA, 23 bp, Artificial Sequence
  HLA-A targeting gRNA
tgtgactgcagacccagggcagg

SEQ ID NO: 2299 - DNA, 23 bp, Artificial Sequence
  HLA-A targeting gRNA
actccacgcaccggccctccagg

SEQ ID NO: 2300 - DNA, 23 bp, Artificial Sequence
  HLA-A targeting gRNA
cacgcaccggccctccaggtagg

SEQ ID NO: 2301 - DNA, 23 bp, Artificial Sequence
  HLA-A targeting gRNA
cttcctccgcgggtaccagcagg

SEQ ID NO: 2302 - DNA, 23 bp, Artificial Sequence
  HLA-A targeting gRNA
tgcggagccactccacgcaccgg

SEQ ID NO: 2303 - DNA, 23 bp, Artificial Sequence
  HLA-A targeting gRNA
tggagggccggtgcgtggagtgg

SEQ ID NO: 2304 - DNA, 23 bp, Artificial Sequence
  HLA-A targeting gRNA
aagatggctctgggaaaagaggg

SEQ ID NO: 2305 - DNA, 23 bp, Artificial Sequence
  HLA-A targeting gRNA
cccggccccgaccaaccaggggg

SEQ ID NO: 2306 - DNA, 23 bp, Artificial Sequence
  HLA-A targeting gRNA
aatctgtccttcattgtcacagg

SEQ ID NO: 2307 - DNA, 23 bp, Artificial Sequence
  HLA-A targeting gRNA
acctgcccaggtctgggtcaggg

SEQ ID NO: 2308 - DNA, 23 bp, Artificial Sequence
  HLA-A targeting gRNA
cccggccggtggcgcaggtcagg

SEQ ID NO: 2309 - DNA, 23 bp, Artificial Sequence
  HLA-A targeting gRNA
agacctgggcaggtgagtgcggg

SEQ ID NO: 2310 - DNA, 23 bp, Artificial Sequence
  HLA-A targeting gRNA
agatggctctgggaaaagagggg

SEQ ID NO: 2311 - DNA, 23 bp, Artificial Sequence
  HLA-A targeting gRNA
aggtgagtgcggggtcgggaggg

SEQ ID NO: 2312 - DNA, 23 bp, Artificial Sequence
  HLA-A targeting gRNA
agtggcctcatggtcagagatgg

SEQ ID NO: 2313 - DNA, 23 bp, Artificial Sequence
  HLA-A targeting gRNA
cacctgcccaggtctgggtcagg

SEQ ID NO: 2314 - DNA, 23 bp, Artificial Sequence
  HLA-A targeting gRNA
cagacctgggcaggtgagtgcgg

SEQ ID NO: 2315 - DNA, 23 bp, Artificial Sequence
  HLA-A targeting gRNA
caggtgagtgcggggtcgggagg

SEQ ID NO: 2316 - DNA, 23 bp, Artificial Sequence
  HLA-A targeting gRNA
cgcactcacctgcccaggtctgg

SEQ ID NO: 2317 - DNA, 23 bp, Artificial Sequence
  HLA-A targeting gRNA
gaccccgcactcacctgcccagg

SEQ ID NO: 2318 - DNA, 23 bp, Artificial Sequence
  HLA-A targeting gRNA
gacctgggcaggtgagtgcgggg

SEQ ID NO: 2319 - DNA, 23 bp, Artificial Sequence
  HLA-A targeting gRNA
gcactcacctgcccaggtctggg

SEQ ID NO: 2320 - DNA, 23 bp, Artificial Sequence
  HLA-A targeting gRNA
gccctgacccagacctgggcagg

SEQ ID NO: 2321 - DNA, 23 bp, Artificial Sequence
  HLA-A targeting gRNA
gggcaggtgagtgcggggtcggg

SEQ ID NO: 2322 - DNA, 23 bp, Artificial Sequence
  HLA-A targeting gRNA
ccctcctgaggtctgtcgtcagg

SEQ ID NO: 2323 - DNA, 23 bp, Artificial Sequence
  HLA-A targeting gRNA
taaagcacctgtgacaatgaagg

SEQ ID NO: 2324 - DNA, 23 bp, Artificial Sequence
  HLA-A targeting gRNA
ccctgacgacagacctcaggagg

SEQ ID NO: 2325 - DNA, 23 bp, Artificial Sequence
  HLA-A targeting gRNA
tgggcaggtgagtgcggggtcgg

SEQ ID NO: 2326 - DNA, 23 bp, Artificial Sequence
  HLA-A targeting gRNA
ccctggccctgacccagaccagg

SEQ ID NO: 2327 - DNA, 23 bp, Artificial Sequence
  HLA-A targeting gRNA
ccctggtctgggtcagggccagg

SEQ ID NO: 2328 - DNA, 23 bp, Artificial Sequence
  HLA-A targeting gRNA
actccctccttttctatctgtgg

SEQ ID NO: 2329 - DNA, 23 bp, Artificial Sequence
  HLA-A targeting gRNA
ccgaaggcggtatatggattggg

SEQ ID NO: 2330 - DNA, 23 bp, Artificial Sequence
  HLA-A targeting gRNA
gaagcaccttccacaatcatggg

SEQ ID NO: 2331 - DNA, 23 bp, Artificial Sequence
  HLA-A targeting gRNA
ccgagcccctcaccctgagatgg

SEQ ID NO: 2332 - DNA, 23 bp, Artificial Sequence
  HLA-A targeting gRNA
ggaagcaccttccacaatcatgg

SEQ ID NO: 2333 - DNA, 23 bp, Artificial Sequence
  HLA-A targeting gRNA
ccgcccatgaggcggagcagtgg

SEQ ID NO: 2334 - DNA, 23 bp, Artificial Sequence
  HLA-A targeting gRNA
ggtcggcccatgattgtggaagg

SEQ ID NO: 2335 - DNA, 23 bp, Artificial Sequence
  HLA-A targeting gRNA
gcagccatacatcctctggatgg

SEQ ID NO: 2336 - DNA, 23 bp, Artificial Sequence
  HLA-A targeting gRNA
ccgccccgccccgacccacccgg

SEQ ID NO: 2337 - DNA, 23 bp, Artificial Sequence
  HLA-A targeting gRNA
agatctataggcgatcagggagg

SEQ ID NO: 2338 - DNA, 23 bp, Artificial Sequence
  HLA-A targeting gRNA
cgcctatagatctcccgggctgg

SEQ ID NO: 2339 - DNA, 23 bp, Artificial Sequence
  HLA-A targeting gRNA
cgggagatctataggcgatcagg

SEQ ID NO: 2340 - DNA, 23 bp, Artificial Sequence
  HLA-A targeting gRNA
ctgatcgcctatagatctcccgg

SEQ ID NO: 2341 - DNA, 23 bp, Artificial Sequence
  HLA-A targeting gRNA
ccgccgcggtctaagagcgcagg

SEQ ID NO: 2342 - DNA, 23 bp, Artificial Sequence
  HLA-A targeting gRNA
ggccagcccgggagatctatagg

SEQ ID NO: 2343 - DNA, 23 bp, Artificial Sequence
  HLA-A targeting gRNA
gggagatctataggcgatcaggg

SEQ ID NO: 2344 - DNA, 23 bp, Artificial Sequence
  HLA-A targeting gRNA
tgatcgcctatagatctcccggg

SEQ ID NO: 2345 - DNA, 23 bp, Artificial Sequence
  HLA-A targeting gRNA
ccggaacacacggaaagtgaagg

SEQ ID NO: 2346 - DNA, 23 bp, Artificial Sequence
  HLA-A targeting gRNA
cacaccatccagaggatgtatgg

SEQ ID NO: 2347 - DNA, 23 bp, Artificial Sequence
  HLA-A targeting gRNA
accctacgtaggttgggagaggg

SEQ ID NO: 2348 - DNA, 23 bp, Artificial Sequence
  HLA-A targeting gRNA
atgaaggaccctacgtaggttgg

SEQ ID NO: 2349 - DNA, 23 bp, Artificial Sequence
  HLA-A targeting gRNA
caggatgaaggaccctacgtagg

SEQ ID NO: 2350 - DNA, 23 bp, Artificial Sequence
  HLA-A targeting gRNA
ccggagatctacaggcgatcagg

SEQ ID NO: 2351 - DNA, 23 bp, Artificial Sequence
  HLA-A targeting gRNA
catcctggatactcacgacgcgg

SEQ ID NO: 2352 - DNA, 23 bp, Artificial Sequence
  HLA-A targeting gRNA
ctacgtagggtccttcatcctgg

SEQ ID NO: 2353 - DNA, 23 bp, Artificial Sequence
  HLA-A targeting gRNA
ctccctctcccaacctacgtagg

SEQ ID NO: 2354 - DNA, 23 bp, Artificial Sequence
  HLA-A targeting gRNA
gaagatggctctgggaaaagagg

SEQ ID NO: 2355 - DNA, 23 bp, Artificial Sequence
  HLA-A targeting gRNA
gaccctacgtaggttgggagagg

SEQ ID NO: 2356 - DNA, 23 bp, Artificial Sequence
  HLA-A targeting gRNA
gtcgtgagtatccaggatgaagg

SEQ ID NO: 2357 - DNA, 23 bp, Artificial Sequence
  HLA-A targeting gRNA
ccgggctgaccgcggggtcgggg

SEQ ID NO: 2358 - DNA, 23 bp, Artificial Sequence
  HLA-A targeting gRNA
tccctctcccaacctacgtaggg

SEQ ID NO: 2359 - DNA, 23 bp, Artificial Sequence
  HLA-A targeting gRNA
tgaaggaccctacgtaggttggg

SEQ ID NO: 2360 - DNA, 23 bp, Artificial Sequence
  HLA-A targeting gRNA
aaccctcctcctgctactcttgg

SEQ ID NO: 2361 - DNA, 23 bp, Artificial Sequence
  HLA-A targeting gRNA
acccgggtagccgcgccgggagg

SEQ ID NO: 2362 - DNA, 23 bp, Artificial Sequence
  HLA-A targeting gRNA
accctcctcctgctactcttggg

SEQ ID NO: 2363 - DNA, 23 bp, Artificial Sequence
  HLA-A targeting gRNA
ccgggtgggtcggggcggggcgg

SEQ ID NO: 2364 - DNA, 23 bp, Artificial Sequence
  HLA-A targeting gRNA
aggacccgggtagccgcgccggg

SEQ ID NO: 2365 - DNA, 23 bp, Artificial Sequence
  HLA-A targeting gRNA
caggacccgggtagccgcgccgg

SEQ ID NO: 2366 - DNA, 23 bp, Artificial Sequence
  HLA-A targeting gRNA
ccagggcccccaagagtagcagg

SEQ ID NO: 2367 - DNA, 23 bp, Artificial Sequence
  HLA-A targeting gRNA
ccccaagagtagcaggaggaggg

SEQ ID NO: 2368 - DNA, 23 bp, Artificial Sequence
  HLA-A targeting gRNA
cccccaagagtagcaggaggagg

SEQ ID NO: 2369 - DNA, 23 bp, Artificial Sequence
  HLA-A targeting gRNA
ccctcctcctgctactcttgggg

SEQ ID NO: 2370 - DNA, 23 bp, Artificial Sequence
  HLA-A targeting gRNA
cctcctcctgctactcttggggg

SEQ ID NO: 2371 - DNA, 23 bp, Artificial Sequence
  HLA-A targeting gRNA
cctgctactcttgggggccctgg

SEQ ID NO: 2372 - DNA, 23 bp, Artificial Sequence
  HLA-A targeting gRNA
cgggtagccgcgccgggaggagg

SEQ ID NO: 2373 - DNA, 23 bp, Artificial Sequence
  HLA-A targeting gRNA
cgggtgagtgcggggtcgtgggg

SEQ ID NO: 2374 - DNA, 23 bp, Artificial Sequence
  HLA-A targeting gRNA
cgtggggaaaccgcctctgcggg

SEQ ID NO: 2375 - DNA, 23 bp, Artificial Sequence
  HLA-A targeting gRNA
ctcctcccggcgcggctacccgg

SEQ ID NO: 2376 - DNA, 23 bp, Artificial Sequence
  HLA-A targeting gRNA
cctcaccctgagatgggataagg

SEQ ID NO: 2377 - DNA, 23 bp, Artificial Sequence
  HLA-A targeting gRNA
gcgggtgagtgcggggtcgtggg

SEQ ID NO: 2378 - DNA, 23 bp, Artificial Sequence
  HLA-A targeting gRNA
cctcaccctgagatgggttaagg

SEQ ID NO: 2379 - DNA, 23 bp, Artificial Sequence
  HLA-A targeting gRNA
ggcgggtgagtgcggggtcgtgg

SEQ ID NO: 2380 - DNA, 23 bp, Artificial Sequence
  HLA-A targeting gRNA
cctcatggagtaggagcctgggg

SEQ ID NO: 2381 - DNA, 23 bp, Artificial Sequence
  HLA-A targeting gRNA
gggcccccaagagtagcaggagg

SEQ ID NO: 2382 - DNA, 23 bp, Artificial Sequence
  HLA-A targeting gRNA
gggtagccgcgccgggaggaggg

SEQ ID NO: 2383 - DNA, 23 bp, Artificial Sequence
  HLA-A targeting gRNA
cctcatggattgggagcctgggg

SEQ ID NO: 2384 - DNA, 23 bp, Artificial Sequence
  HLA-A targeting gRNA
gtggggaaaccgcctctgcgggg

SEQ ID NO: 2385 - DNA, 23 bp, Artificial Sequence
  HLA-A targeting gRNA
tcctcccggcgcggctacccggg

SEQ ID NO: 2386 - DNA, 23 bp, Artificial Sequence
  HLA-A targeting gRNA
cctccacgagctccgtgtcctgg

SEQ ID NO: 2387 - DNA, 23 bp, Artificial Sequence
  HLA-A targeting gRNA
tcgtggggaaaccgcctctgcgg

SEQ ID NO: 2388 - DNA, 23 bp, Artificial Sequence
  HLA-A targeting gRNA
caggttctcacaccatccagagg

SEQ ID NO: 2389 - DNA, 23 bp, Artificial Sequence
  HLA-A targeting gRNA
ctctggatggtgtgagaacctgg

SEQ ID NO: 2390 - DNA, 23 bp, Artificial Sequence
  HLA-A targeting gRNA
gagtctctcagcctccactcagg

SEQ ID NO: 2391 - DNA, 23 bp, Artificial Sequence
  HLA-A targeting gRNA
gctgagagactcagaagtgctgg

SEQ ID NO: 2392 - DNA, 23 bp, Artificial Sequence
  HLA-A targeting gRNA
cctcctgaggtctgtcgtcaggg

SEQ ID NO: 2393 - DNA, 23 bp, Artificial Sequence
  HLA-A targeting gRNA
tctcagcctccactcaggtcagg

SEQ ID NO: 2394 - DNA, 23 bp, Artificial Sequence
  HLA-A targeting gRNA
cctctagccacatgttctgtggg

SEQ ID NO: 2395 - DNA, 23 bp, Artificial Sequence
  HLA-A targeting gRNA
cctctctggagacctttatcagg

SEQ ID NO: 2396 - DNA, 23 bp, Artificial Sequence
  HLA-A targeting gRNA
cctgacctgcgccaccggccggg

SEQ ID NO: 2397 - DNA, 23 bp, Artificial Sequence
  HLA-A targeting gRNA
cctgacgacagacctcaggaggg

SEQ ID NO: 2398 - DNA, 23 bp, Artificial Sequence
  HLA-A targeting gRNA
cctgataaaggtctccagagagg

SEQ ID NO: 2399 - DNA, 23 bp, Artificial Sequence
  HLA-A targeting gRNA
cctgatcgcctgtagatctccgg

SEQ ID NO: 2400 - DNA, 23 bp, Artificial Sequence
  HLA-A targeting gRNA
cctgcagacacgtaatgtgaagg

SEQ ID NO: 2401 - DNA, 23 bp, Artificial Sequence
  HLA-A targeting gRNA
cctgcgctcttagaccgcggcgg

SEQ ID NO: 2402 - DNA, 23 bp, Artificial Sequence
  HLA-A targeting gRNA
cctggccctgacccagaccaggg

SEQ ID NO: 2403 - DNA, 23 bp, Artificial Sequence
  HLA-A targeting gRNA
cctgggcctctcccgggacaagg

SEQ ID NO: 2404 - DNA, 23 bp, Artificial Sequence
  HLA-A targeting gRNA
cctggtctgggtcagggccaggg

SEQ ID NO: 2405 - DNA, 23 bp, Artificial Sequence
  HLA-A targeting gRNA
ccttaacccatctcagggtgagg

SEQ ID NO: 2406 - DNA, 23 bp, Artificial Sequence
  HLA-A targeting gRNA
ccttatcccatctcagggtgagg

SEQ ID NO: 2407 - DNA, 23 bp, Artificial Sequence
  HLA-A targeting gRNA
ccttcacattacgtgtctgcagg

SEQ ID NO: 2408 - DNA, 23 bp, Artificial Sequence
  HLA-A targeting gRNA
ccttcacattccgcgtctcctgg

SEQ ID NO: 2409 - DNA, 23 bp, Artificial Sequence
  HLA-A targeting gRNA
ccttcactttccgtgtgttccgg

SEQ ID NO: 2410 - DNA, 23 bp, Artificial Sequence
  HLA-A targeting gRNA
ccttcatattccgtgtctcctgg

SEQ ID NO: 2411 - DNA, 23 bp, Artificial Sequence
  HLA-A targeting gRNA
acagactgaccgagcgaacctgg

SEQ ID NO: 2412 - DNA, 23 bp, Artificial Sequence
  HLA-A targeting gRNA
agactgaccgagcgaacctgggg

SEQ ID NO: 2413 - DNA, 23 bp, Artificial Sequence
  HLA-A targeting gRNA
cagactgaccgagcgaacctggg

SEQ ID NO: 2414 - DNA, 23 bp, Artificial Sequence
  HLA-A targeting gRNA
ccttgtcccgggagaggcccagg

SEQ ID NO: 2415 - DNA, 23 bp, Artificial Sequence
  HLA-A targeting gRNA
cgaaggcggtatatggattgggg

SEQ ID NO: 2416 - DNA, 23 bp, Artificial Sequence
  HLA-A targeting gRNA
gaagcaccatccacaatcatggg

SEQ ID NO: 2417 - DNA, 23 bp, Artificial Sequence
  HLA-A targeting gRNA
cgacacgcagttcgtgcggttgg

SEQ ID NO: 2418 - DNA, 23 bp, Artificial Sequence
  HLA-A targeting gRNA
cgaccaaccagggggatttttgg

SEQ ID NO: 2419 - DNA, 23 bp, Artificial Sequence
  HLA-A targeting gRNA
cgacctgccggtacccgcggagg

SEQ ID NO: 2420 - DNA, 23 bp, Artificial Sequence
  HLA-A targeting gRNA
cgacgccgcgagccaaaggatgg

SEQ ID NO: 2421 - DNA, 23 bp, Artificial Sequence
  HLA-A targeting gRNA
cgacgccgcgagccagaagatgg

SEQ ID NO: 2422 - DNA, 23 bp, Artificial Sequence
  HLA-A targeting gRNA
ggaagcaccatccacaatcatgg

SEQ ID NO: 2423 - DNA, 23 bp, Artificial Sequence
  HLA-A targeting gRNA
gatggtgtgagaacctggcccgg

SEQ ID NO: 2424 - DNA, 23 bp, Artificial Sequence
  HLA-A targeting gRNA
ctcatcccccacggacgggccgg

SEQ ID NO: 2425 - DNA, 23 bp, Artificial Sequence
  HLA-A targeting gRNA
gcgacccggcccgtccgtggggg

SEQ ID NO: 2426 - DNA, 23 bp, Artificial Sequence
  HLA-A targeting gRNA
cgagacccttgtcccgggagagg

SEQ ID NO: 2427 - DNA, 23 bp, Artificial Sequence
  HLA-A targeting gRNA
tcatcccccacggacgggccggg

SEQ ID NO: 2428 - DNA, 23 bp, Artificial Sequence
  HLA-A targeting gRNA
cgagccaaaggatggagccgcgg

SEQ ID NO: 2429 - DNA, 23 bp, Artificial Sequence
  HLA-A targeting gRNA
cgagccagaagatggagccgcgg

SEQ ID NO: 2430 - DNA, 23 bp, Artificial Sequence
  HLA-A targeting gRNA
cgagcccctcaccctgagatggg

SEQ ID NO: 2431 - DNA, 23 bp, Artificial Sequence
  HLA-A targeting gRNA
accgggctgacctcggggtccgg

SEQ ID NO: 2432 - DNA, 23 bp, Artificial Sequence
  HLA-A targeting gRNA
agaacctggcccggaccccgagg

SEQ ID NO: 2433 - DNA, 23 bp, Artificial Sequence
  HLA-A targeting gRNA
cgaggacggtgaccccggcccgg

SEQ ID NO: 2434 - DNA, 23 bp, Artificial Sequence
  HLA-A targeting gRNA
cgaggagacacggaatgtgaagg

SEQ ID NO: 2435 - DNA, 23 bp, Artificial Sequence
  HLA-A targeting gRNA
cccggaccccgaggtcagcccgg

SEQ ID NO: 2436 - DNA, 23 bp, Artificial Sequence
  HLA-A targeting gRNA
ccgggctgacctcggggtccggg

SEQ ID NO: 2437 - DNA, 23 bp, Artificial Sequence
  HLA-A targeting gRNA
cgatgaagcagggctccccgcgg

SEQ ID NO: 2438 - DNA, 23 bp, Artificial Sequence
  HLA-A targeting gRNA
cgggggaccgggctgacctcggg

SEQ ID NO: 2439 - DNA, 23 bp, Artificial Sequence
  HLA-A targeting gRNA
ctgacctcggggtccgggccagg

SEQ ID NO: 2440 - DNA, 23 bp, Artificial Sequence
  HLA-A targeting gRNA
cgatgaagcggggttccccgcgg

SEQ ID NO: 2441 - DNA, 23 bp, Artificial Sequence
  HLA-A targeting gRNA
cgcacaggtaccaggggccacgg

SEQ ID NO: 2442 - DNA, 23 bp, Artificial Sequence
  HLA-A targeting gRNA
cgcacgagtaccaggggccacgg

SEQ ID NO: 2443 - DNA, 23 bp, Artificial Sequence
  HLA-A targeting gRNA
cgcacgggtaccagggaccacgg

SEQ ID NO: 2444 - DNA, 23 bp, Artificial Sequence
  HLA-A targeting gRNA
gggggaccgggctgacctcgggg

SEQ ID NO: 2445 - DNA, 23 bp, Artificial Sequence
  HLA-A targeting gRNA
tcgggggaccgggctgacctcgg

SEQ ID NO: 2446 - DNA, 23 bp, Artificial Sequence
  HLA-A targeting gRNA
cccggagactgtgggcgacccgg

SEQ ID NO: 2447 - DNA, 23 bp, Artificial Sequence
  HLA-A targeting gRNA
cgcactcacccgccctggtctgg

SEQ ID NO: 2448 - DNA, 23 bp, Artificial Sequence
  HLA-A targeting gRNA
ccgggtcgcccacagtctccggg

SEQ ID NO: 2449 - DNA, 23 bp, Artificial Sequence
  HLA-A targeting gRNA
cgcactggtaccaggggccacgg

SEQ ID NO: 2450 - DNA, 23 bp, Artificial Sequence
  HLA-A targeting gRNA
gccgggtcgcccacagtctccgg

SEQ ID NO: 2451 - DNA, 23 bp, Artificial Sequence
  HLA-A targeting gRNA
ggcgacccggcccgtccgtgggg

SEQ ID NO: 2452 - DNA, 23 bp, Artificial Sequence
  HLA-A targeting gRNA
gggcgacccggcccgtccgtggg

SEQ ID NO: 2453 - DNA, 23 bp, Artificial Sequence
  HLA-A targeting gRNA
tgggcgacccggcccgtccgtgg

SEQ ID NO: 2454 - DNA, 23 bp, Artificial Sequence
  HLA-A targeting gRNA
ccggaacacacggaatgtgaagg

SEQ ID NO: 2455 - DNA, 23 bp, Artificial Sequence
  HLA-A targeting gRNA
ccttcacattccgtgtgttccgg

SEQ ID NO: 2456 - DNA, 23 bp, Artificial Sequence
  HLA-A targeting gRNA
gcagggtccccaggttcgctcgg

SEQ ID NO: 2457 - DNA, 23 bp, Artificial Sequence
  HLA-A targeting gRNA
cgccccgccccgacccacccggg

SEQ ID NO: 2458 - DNA, 23 bp, Artificial Sequence
  HLA-A targeting gRNA
gcgaacctggggaccctgcgcgg

SEQ ID NO: 2459 - DNA, 23 bp, Artificial Sequence
  HLA-A targeting gRNA
acccgggaagccgcgcctggagg

SEQ ID NO: 2460 - DNA, 23 bp, Artificial Sequence
  HLA-A targeting gRNA
cgccctccctctggtcttgaggg

SEQ ID NO: 2461 - DNA, 23 bp, Artificial Sequence
  HLA-A targeting gRNA
agccgcgcctggaggagggtcgg

SEQ ID NO: 2462 - DNA, 23 bp, Artificial Sequence
  HLA-A targeting gRNA
aggacccgggaagccgcgcctgg

SEQ ID NO: 2463 - DNA, 23 bp, Artificial Sequence
  HLA-A targeting gRNA
ccccttgcttctccccacagagg

SEQ ID NO: 2464 - DNA, 23 bp, Artificial Sequence
  HLA-A targeting gRNA
cctctgtggggagaagcaagggg

SEQ ID NO: 2465 - DNA, 23 bp, Artificial Sequence
  HLA-A targeting gRNA
cgcctggaggagggtcgggcggg

SEQ ID NO: 2466 - DNA, 23 bp, Artificial Sequence
  HLA-A targeting gRNA
cgggaagccgcgcctggaggagg

SEQ ID NO: 2467 - DNA, 23 bp, Artificial Sequence
  HLA-A targeting gRNA
ctcctccaggcgcggcttcccgg

SEQ ID NO: 2468 - DNA, 23 bp, Artificial Sequence
  HLA-A targeting gRNA
gacccgcccgaccctcctccagg

SEQ ID NO: 2469 - DNA, 23 bp, Artificial Sequence
  HLA-A targeting gRNA
gcccgaccctcctccaggcgcgg

SEQ ID NO: 2470 - DNA, 23 bp, Artificial Sequence
  HLA-A targeting gRNA
gccgcgcctggaggagggtcggg

SEQ ID NO: 2471 - DNA, 23 bp, Artificial Sequence
  HLA-A targeting gRNA
gcctctgtggggagaagcaaggg

SEQ ID NO: 2472 - DNA, 23 bp, Artificial Sequence
  HLA-A targeting gRNA
gcgcctggaggagggtcgggcgg

SEQ ID NO: 2473 - DNA, 23 bp, Artificial Sequence
  HLA-A targeting gRNA
cgcctgtagatctccggggctgg

SEQ ID NO: 2474 - DNA, 23 bp, Artificial Sequence
  HLA-A targeting gRNA
ggcctctgtggggagaagcaagg

SEQ ID NO: 2475 - DNA, 23 bp, Artificial Sequence
  HLA-A targeting gRNA
gggaagccgcgcctggaggaggg

SEQ ID NO: 2476 - DNA, 23 bp, Artificial Sequence
  HLA-A targeting gRNA
tcctccaggcgcggcttcccggg

SEQ ID NO: 2477 - DNA, 23 bp, Artificial Sequence
  HLA-A targeting gRNA
cgcgggtaccaggggccacaggg

SEQ ID NO: 2478 - DNA, 23 bp, Artificial Sequence
  HLA-A targeting gRNA
accgggggagccgcgccgggagg

SEQ ID NO: 2479 - DNA, 23 bp, Artificial Sequence
  HLA-A targeting gRNA
cgctcggtcagtctgtgagtggg

SEQ ID NO: 2480 - DNA, 23 bp, Artificial Sequence
  HLA-A targeting gRNA
cgctcggttagtctgtgagtggg

SEQ ID NO: 2481 - DNA, 23 bp, Artificial Sequence
  HLA-A targeting gRNA
cgctgcagcgcacaggtaccagg

SEQ ID NO: 2482 - DNA, 23 bp, Artificial Sequence
  HLA-A targeting gRNA
cgctgcagcgcacgagtaccagg

SEQ ID NO: 2483 - DNA, 23 bp, Artificial Sequence
  HLA-A targeting gRNA
gggggagccgcgccgggaggagg

SEQ ID NO: 2484 - DNA, 23 bp, Artificial Sequence
  HLA-A targeting gRNA
cgctgcagcgcactggtaccagg

SEQ ID NO: 2485 - DNA, 23 bp, Artificial Sequence
  HLA-A targeting gRNA
tcctcccggcgcggctcccccgg

SEQ ID NO: 2486 - DNA, 23 bp, Artificial Sequence
  HLA-A targeting gRNA
agtattgggaccggaacacacgg

SEQ ID NO: 2487 - DNA, 23 bp, Artificial Sequence
  HLA-A targeting gRNA
cggagatctacaggcgatcaggg

SEQ ID NO: 2488 - DNA, 23 bp, Artificial Sequence
  HLA-A targeting gRNA
cggagtctcccacttgcgctggg

SEQ ID NO: 2489 - DNA, 23 bp, Artificial Sequence
  HLA-A targeting gRNA
cggcccgtccgtggggaatgagg

SEQ ID NO: 2490 - DNA, 23 bp, Artificial Sequence
  HLA-A targeting gRNA
cggcccgtcgggcggagcagcgg

SEQ ID NO: 2491 - DNA, 23 bp, Artificial Sequence
  HLA-A targeting gRNA
cggctactacaacgagagcgagg

SEQ ID NO: 2492 - DNA, 23 bp, Artificial Sequence
  HLA-A targeting gRNA
cagcagagagcctacctggaggg

SEQ ID NO: 2493 - DNA, 23 bp, Artificial Sequence
  HLA-A targeting gRNA
gcagcagagagcctacctggagg

SEQ ID NO: 2494 - DNA, 23 bp, Artificial Sequence
  HLA-A targeting gRNA
cggctccatcctttggctcgcgg

SEQ ID NO: 2495 - DNA, 23 bp, Artificial Sequence
  HLA-A targeting gRNA
cggctccatcttctggctcgcgg

SEQ ID NO: 2496 - DNA, 23 bp, Artificial Sequence
  HLA-A targeting gRNA
ccgccgcggtccaggagcgcagg

SEQ ID NO: 2497 - DNA, 23 bp, Artificial Sequence
  HLA-A targeting gRNA
cctgcgctcctggaccgcggcgg

SEQ ID NO: 2498 - DNA, 23 bp, Artificial Sequence
  HLA-A targeting gRNA
ctacctggagggccggtgcgtgg

SEQ ID NO: 2499 - DNA, 23 bp, Artificial Sequence
  HLA-A targeting gRNA
ggacctgcgctcctggaccgcgg

SEQ ID NO: 2500 - DNA, 23 bp, Artificial Sequence
  HLA-A targeting gRNA
ggacgggctccgcagatacctgg

SEQ ID NO: 2501 - DNA, 23 bp, Artificial Sequence
  HLA-A targeting gRNA
ggagcagcagagagcctacctgg

SEQ ID NO: 2502 - DNA, 23 bp, Artificial Sequence
  HLA-A targeting gRNA
cagacacctggagaacgggaagg

SEQ ID NO: 2503 - DNA, 23 bp, Artificial Sequence
  HLA-A targeting gRNA
accttgattatggcggtgatggg

SEQ ID NO: 2504 - DNA, 23 bp, Artificial Sequence
  HLA-A targeting gRNA
atttatcaccttgattatggcgg

SEQ ID NO: 2505 - DNA, 23 bp, Artificial Sequence
  HLA-A targeting gRNA
caccttgattatggcggtgatgg

SEQ ID NO: 2506 - DNA, 23 bp, Artificial Sequence
  HLA-A targeting gRNA
cagatttatcaccttgattatgg

SEQ ID NO: 2507 - DNA, 23 bp, Artificial Sequence
  HLA-A targeting gRNA
tcccatcaccgccataatcaagg

SEQ ID NO: 2508 - DNA, 23 bp, Artificial Sequence
  HLA-A targeting gRNA
cggggctcgggggagctgggcgg

SEQ ID NO: 2509 - DNA, 23 bp, Artificial Sequence
  HLA-A targeting gRNA
ctccgcagacacctggagaacgg

SEQ ID NO: 2510 - DNA, 23 bp, Artificial Sequence
  HLA-A targeting gRNA
tcccgttctccaggtgtctgcgg

SEQ ID NO: 2511 - DNA, 23 bp, Artificial Sequence
  HLA-A targeting gRNA
tccgcagacacctggagaacggg

SEQ ID NO: 2512 - DNA, 23 bp, Artificial Sequence
  HLA-A targeting gRNA
cgggggagctgggcggggctcgg

SEQ ID NO: 2513 - DNA, 23 bp, Artificial Sequence
  HLA-A targeting gRNA
cgggggctgggctgaccgcgggg

SEQ ID NO: 2514 - DNA, 23 bp, Artificial Sequence
  HLA-A targeting gRNA
cggggtcaccgtcctcgctctgg

SEQ ID NO: 2515 - DNA, 23 bp, Artificial Sequence
  HLA-A targeting gRNA
ggagtggctccgcagacacctgg

SEQ ID NO: 2516 - DNA, 23 bp, Artificial Sequence
  HLA-A targeting gRNA
cgggtgggtcggggcggggcggg

SEQ ID NO: 2517 - DNA, 23 bp, Artificial Sequence
  HLA-A targeting gRNA
gaagaaatacctcatggagtggg

SEQ ID NO: 2518 - DNA, 23 bp, Artificial Sequence
  HLA-A targeting gRNA
tgaagaaatacctcatggagtgg

SEQ ID NO: 2519 - DNA, 23 bp, Artificial Sequence
  HLA-A targeting gRNA
atttctccacatccgtgtcccgg

SEQ ID NO: 2520 - DNA, 23 bp, Artificial Sequence
  HLA-A targeting gRNA
tccacatccgtgtcccggcccgg

SEQ ID NO: 2521 - DNA, 23 bp, Artificial Sequence
  HLA-A targeting gRNA
cggtccatgcggcggagcagcgg

SEQ ID NO: 2522 - DNA, 23 bp, Artificial Sequence
  HLA-A targeting gRNA
cggtgagtgaccccggccggtgg

SEQ ID NO: 2523 - DNA, 23 bp, Artificial Sequence
  HLA-A targeting gRNA
cgtagcccacagcgatgaagcgg

SEQ ID NO: 2524 - DNA, 23 bp, Artificial Sequence
  HLA-A targeting gRNA
cgtccacgcaccggccctccagg

SEQ ID NO: 2525 - DNA, 23 bp, Artificial Sequence
  HLA-A targeting gRNA
cgtccacgcactcgccctccagg

SEQ ID NO: 2526 - DNA, 23 bp, Artificial Sequence
  HLA-A targeting gRNA
cgtcgcaaccatacatcctctgg

SEQ ID NO: 2527 - DNA, 23 bp, Artificial Sequence
  HLA-A targeting gRNA
cgtcttggggggggtctgtcagg

SEQ ID NO: 2528 - DNA, 23 bp, Artificial Sequence
  HLA-A targeting gRNA
cgtgacctgcgcccccggccggg

SEQ ID NO: 2529 - DNA, 23 bp, Artificial Sequence
  HLA-A targeting gRNA
cgtgctgccggtacccgcggagg

SEQ ID NO: 2530 - DNA, 23 bp, Artificial Sequence
  HLA-A targeting gRNA
cgtggaggccaggcctgcagggg

SEQ ID NO: 2531 - DNA, 23 bp, Artificial Sequence
  HLA-A targeting gRNA
cgtggcagccatacatcatctgg

SEQ ID NO: 2532 - DNA, 23 bp, Artificial Sequence
  HLA-A targeting gRNA
cgtgggcatccttgctggcctgg

SEQ ID NO: 2533 - DNA, 23 bp, Artificial Sequence
  HLA-A targeting gRNA
cgtgtcgtccatgtagcccacgg

SEQ ID NO: 2534 - DNA, 23 bp, Artificial Sequence
  HLA-A targeting gRNA
ctacctggagggcgagttcgtgg

SEQ ID NO: 2535 - DNA, 23 bp, Artificial Sequence
  HLA-A targeting gRNA
ctagaggaacctcgtagccttgg

SEQ ID NO: 2536 - DNA, 23 bp, Artificial Sequence
  HLA-A targeting gRNA
ctataatatcgccctccctctgg

SEQ ID NO: 2537 - DNA, 23 bp, Artificial Sequence
  HLA-A targeting gRNA
ctcacccactcctcgcccccagg

SEQ ID NO: 2538 - DNA, 23 bp, Artificial Sequence
  HLA-A targeting gRNA
ctcagatcaccaagcacaagtgg

SEQ ID NO: 2539 - DNA, 23 bp, Artificial Sequence
  HLA-A targeting gRNA
ctcagatcaccgagcgcaagtgg

SEQ ID NO: 2540 - DNA, 23 bp, Artificial Sequence
  HLA-A targeting gRNA
ctcagctactcctcgcccccagg

SEQ ID NO: 2541 - DNA, 23 bp, Artificial Sequence
  HLA-A targeting gRNA
ctcaggagggcggttggtccagg

SEQ ID NO: 2542 - DNA, 23 bp, Artificial Sequence
  HLA-A targeting gRNA
ctcatggagtaggagcctggggg

SEQ ID NO: 2543 - DNA, 23 bp, Artificial Sequence
  HLA-A targeting gRNA
ctcattccccacggacgggccgg

SEQ ID NO: 2544 - DNA, 23 bp, Artificial Sequence
  HLA-A targeting gRNA
ctccacagggtagaagctcaggg

SEQ ID NO: 2545 - DNA, 23 bp, Artificial Sequence
  HLA-A targeting gRNA
ctccagcgatcacagctccaagg

SEQ ID NO: 2546 - DNA, 23 bp, Artificial Sequence
  HLA-A targeting gRNA
ctcccaaccacaatatcccaagg

SEQ ID NO: 2547 - DNA, 23 bp, Artificial Sequence
  HLA-A targeting gRNA
ctccctcaagaccagagggaggg

SEQ ID NO: 2548 - DNA, 23 bp, Artificial Sequence
  HLA-A targeting gRNA
ctccctcaggagcagagggaggg

SEQ ID NO: 2549 - DNA, 23 bp, Artificial Sequence
  HLA-A targeting gRNA
ctccctccttaacccatctcagg

SEQ ID NO: 2550 - DNA, 23 bp, Artificial Sequence
  HLA-A targeting gRNA
ctccctccttatcccatctcagg

SEQ ID NO: 2551 - DNA, 23 bp, Artificial Sequence
  HLA-A targeting gRNA
ctccctccttttctaactgtggg

SEQ ID NO: 2552 - DNA, 23 bp, Artificial Sequence
  HLA-A targeting gRNA
ctccgcagatacctgaagaacgg

SEQ ID NO: 2553 - DNA, 23 bp, Artificial Sequence
  HLA-A targeting gRNA
ctccgcctcccacttgcgcttgg

SEQ ID NO: 2554 - DNA, 23 bp, Artificial Sequence
  HLA-A targeting gRNA
ctcctggaccgcggcggacatgg

SEQ ID NO: 2555 - DNA, 23 bp, Artificial Sequence
  HLA-A targeting gRNA
ctccttggagctgtgatcgctgg

SEQ ID NO: 2556 - DNA, 23 bp, Artificial Sequence
  HLA-A targeting gRNA
ctcggagccccgcggcttcgggg

SEQ ID NO: 2557 - DNA, 23 bp, Artificial Sequence
  HLA-A targeting gRNA
ctcggagtcccgcggcttcgggg

SEQ ID NO: 2558 - DNA, 23 bp, Artificial Sequence
  HLA-A targeting gRNA
ctcgggggctgggctgaccgcgg

SEQ ID NO: 2559 - DNA, 23 bp, Artificial Sequence
  HLA-A targeting gRNA
ctcgtggaggccaggcctgcagg

SEQ ID NO: 2560 - DNA, 23 bp, Artificial Sequence
  HLA-A targeting gRNA
ctcgttgtagtagccgcgcaggg

SEQ ID NO: 2561 - DNA, 23 bp, Artificial Sequence
  HLA-A targeting gRNA
ctctcaactgctccgcccaacgg

SEQ ID NO: 2562 - DNA, 23 bp, Artificial Sequence
  HLA-A targeting gRNA
ctctcaactgctcctccacacgg

SEQ ID NO: 2563 - DNA, 23 bp, Artificial Sequence
  HLA-A targeting gRNA
ctctcaactgctctgccacacgg

SEQ ID NO: 2564 - DNA, 23 bp, Artificial Sequence
  HLA-A targeting gRNA
ctctcagctgctccgccacatgg

SEQ ID NO: 2565 - DNA, 23 bp, Artificial Sequence
  HLA-A targeting gRNA
ctctcagctgctccgcccgacgg

SEQ ID NO: 2566 - DNA, 23 bp, Artificial Sequence
  HLA-A targeting gRNA
ctctcccgggacaagggtctcgg

SEQ ID NO: 2567 - DNA, 23 bp, Artificial Sequence
  HLA-A targeting gRNA
ctctccgctgctccgcccgacgg

SEQ ID NO: 2568 - DNA, 23 bp, Artificial Sequence
  HLA-A targeting gRNA
ctctccgctgctccgccgcatgg

SEQ ID NO: 2569 - DNA, 23 bp, Artificial Sequence
  HLA-A targeting gRNA
ctctcggtcagtctgtgactggg

SEQ ID NO: 2570 - DNA, 23 bp, Artificial Sequence
  HLA-A targeting gRNA
ctctctgctgctccgccacacgg

SEQ ID NO: 2571 - DNA, 23 bp, Artificial Sequence
  HLA-A targeting gRNA
ctctctgctgctccgcctcatgg

SEQ ID NO: 2572 - DNA, 23 bp, Artificial Sequence
  HLA-A targeting gRNA
ctctctggagacctttatcaggg

SEQ ID NO: 2573 - DNA, 23 bp, Artificial Sequence
  HLA-A targeting gRNA
ctctgcagggtagaagcccaggg

SEQ ID NO: 2574 - DNA, 23 bp, Artificial Sequence
  HLA-A targeting gRNA
ctctggatgctgtgagaacctgg

SEQ ID NO: 2575 - DNA, 23 bp, Artificial Sequence
  HLA-A targeting gRNA
ctctggggtccaaggctacgagg

SEQ ID NO: 2576 - DNA, 23 bp, Artificial Sequence
  HLA-A targeting gRNA
ctcttagaccgcggcggacatgg

SEQ ID NO: 2577 - DNA, 23 bp, Artificial Sequence
  HLA-A targeting gRNA
ctgaaaatgaaaccggctaaagg

SEQ ID NO: 2578 - DNA, 23 bp, Artificial Sequence
  HLA-A targeting gRNA
ctgaccatgaggccactctgagg

SEQ ID NO: 2579 - DNA, 23 bp, Artificial Sequence
  HLA-A targeting gRNA
ccccccgggttggtcggggcggg

SEQ ID NO: 2580 - DNA, 23 bp, Artificial Sequence
  HLA-A targeting gRNA
cccccgggttggtcggggcgggg

SEQ ID NO: 2581 - DNA, 23 bp, Artificial Sequence
  HLA-A targeting gRNA
ctgacctgcgccaccggccgggg

SEQ ID NO: 2582 - DNA, 23 bp, Artificial Sequence
  HLA-A targeting gRNA
ccccgccccgaccaacccggggg

SEQ ID NO: 2583 - DNA, 23 bp, Artificial Sequence
  HLA-A targeting gRNA
cccgccccgaccaacccgggggg

SEQ ID NO: 2584 - DNA, 23 bp, Artificial Sequence
  HLA-A targeting gRNA
ccgccccgccccgaccaacccgg

SEQ ID NO: 2585 - DNA, 23 bp, Artificial Sequence
  HLA-A targeting gRNA
ccgggttggtcggggcggggcgg

SEQ ID NO: 2586 - DNA, 23 bp, Artificial Sequence
  HLA-A targeting gRNA
ctgaggtccttgggatattgtgg

SEQ ID NO: 2587 - DNA, 23 bp, Artificial Sequence
  HLA-A targeting gRNA
cgccccgccccgaccaacccggg

SEQ ID NO: 2588 - DNA, 23 bp, Artificial Sequence
  HLA-A targeting gRNA
gccccgccccgaccaacccgggg

SEQ ID NO: 2589 - DNA, 23 bp, Artificial Sequence
  HLA-A targeting gRNA
ctgatcgcctgtagatctccggg

SEQ ID NO: 2590 - DNA, 23 bp, Artificial Sequence
  HLA-A targeting gRNA
tccccccgggttggtcggggcgg

SEQ ID NO: 2591 - DNA, 23 bp, Artificial Sequence
  HLA-A targeting gRNA
ctgatgtgtgttgggtgttgggg

SEQ ID NO: 2592 - DNA, 23 bp, Artificial Sequence
  HLA-A targeting gRNA
ctgcagagatcacactgacctgg

SEQ ID NO: 2593 - DNA, 23 bp, Artificial Sequence
  HLA-A targeting gRNA
ctgcagcgcacaggtaccagggg

SEQ ID NO: 2594 - DNA, 23 bp, Artificial Sequence
  HLA-A targeting gRNA
ctgcagcgcacgagtaccagggg

SEQ ID NO: 2595 - DNA, 23 bp, Artificial Sequence
  HLA-A targeting gRNA
cgggagggaaaccgcctctgcgg

SEQ ID NO: 2596 - DNA, 23 bp, Artificial Sequence
  HLA-A targeting gRNA
ggagggaaaccgcctctgcgggg

SEQ ID NO: 2597 - DNA, 23 bp, Artificial Sequence
  HLA-A targeting gRNA
ctgcagcgcactggtaccagggg

SEQ ID NO: 2598 - DNA, 23 bp, Artificial Sequence
  HLA-A targeting gRNA
gggagggaaaccgcctctgcggg

SEQ ID NO: 2599 - DNA, 23 bp, Artificial Sequence
  HLA-A targeting gRNA
ctgcccggccccgaccaaccagg

SEQ ID NO: 2600 - DNA, 23 bp, Artificial Sequence
  HLA-A targeting gRNA
ctgccgccggtgtgtgtcaaagg

SEQ ID NO: 2601 - DNA, 23 bp, Artificial Sequence
  HLA-A targeting gRNA
ctgccttgtgtgggactgaaagg

SEQ ID NO: 2602 - DNA, 23 bp, Artificial Sequence
  HLA-A targeting gRNA
ggtgtgacccctcactgtgatgg

SEQ ID NO: 2603 - DNA, 23 bp, Artificial Sequence
  HLA-A targeting gRNA
ctcagccactgctcgcccccagg

SEQ ID NO: 2604 - DNA, 23 bp, Artificial Sequence
  HLA-A targeting gRNA
gggagcctgggggcgagcagtgg

SEQ ID NO: 2605 - DNA, 23 bp, Artificial Sequence
  HLA-A targeting gRNA
ctggaaacccgacacccaatagg

SEQ ID NO: 2606 - DNA, 23 bp, Artificial Sequence
  HLA-A targeting gRNA
aagacagctctgggaaaagaggg

SEQ ID NO: 2607 - DNA, 23 bp, Artificial Sequence
  HLA-A targeting gRNA
ctggaaacccgacacccaattgg

SEQ ID NO: 2608 - DNA, 23 bp, Artificial Sequence
  HLA-A targeting gRNA
agacagctctgggaaaagagggg

SEQ ID NO: 2609 - DNA, 23 bp, Artificial Sequence
  HLA-A targeting gRNA
agctctgggaaaagaggggaagg

SEQ ID NO: 2610 - DNA, 23 bp, Artificial Sequence
  HLA-A targeting gRNA
ctggaccaaccgccctcctgagg

SEQ ID NO: 2611 - DNA, 23 bp, Artificial Sequence
  HLA-A targeting gRNA
gaagacagctctgggaaaagagg

SEQ ID NO: 2612 - DNA, 23 bp, Artificial Sequence
  HLA-A targeting gRNA
ctggaccaatcgccctcctgagg

SEQ ID NO: 2613 - DNA, 23 bp, Artificial Sequence
  HLA-A targeting gRNA
gtgggctgggaagacagctctgg

SEQ ID NO: 2614 - DNA, 23 bp, Artificial Sequence
  HLA-A targeting gRNA
ctggagggccggtgcgtggacgg

SEQ ID NO: 2615 - DNA, 23 bp, Artificial Sequence
  HLA-A targeting gRNA
tgggctgggaagacagctctggg

SEQ ID NO: 2616 - DNA, 23 bp, Artificial Sequence
  HLA-A targeting gRNA
ctggagggcgagtgcgtggacgg

SEQ ID NO: 2617 - DNA, 23 bp, Artificial Sequence
  HLA-A targeting gRNA
aaaaggagggagttacactcagg

SEQ ID NO: 2618 - DNA, 23 bp, Artificial Sequence
  HLA-A targeting gRNA
acagacctcaggagggctattgg

SEQ ID NO: 2619 - DNA, 23 bp, Artificial Sequence
  HLA-A targeting gRNA
ctcaggagggctattggtccagg

SEQ ID NO: 2620 - DNA, 23 bp, Artificial Sequence
  HLA-A targeting gRNA
ctggaccaatagccctcctgagg

SEQ ID NO: 2621 - DNA, 23 bp, Artificial Sequence
  HLA-A targeting gRNA
gctcttcctcctccacatcacgg

SEQ ID NO: 2622 - DNA, 23 bp, Artificial Sequence
  HLA-A targeting gRNA
tcgctgccgtgatgtggaggagg

SEQ ID NO: 2623 - DNA, 23 bp, Artificial Sequence
  HLA-A targeting gRNA
agcatgcgatgggctgtttaagg

SEQ ID NO: 2624 - DNA, 23 bp, Artificial Sequence
  HLA-A targeting gRNA
ctgggcctctcccgggacaaggg

SEQ ID NO: 2625 - DNA, 23 bp, Artificial Sequence
  HLA-A targeting gRNA
aaaatctctgaaggagtgacggg

SEQ ID NO: 2626 - DNA, 23 bp, Artificial Sequence
  HLA-A targeting gRNA
aagcaaggggccctcctggcggg

SEQ ID NO: 2627 - DNA, 23 bp, Artificial Sequence
  HLA-A targeting gRNA
aagtcgctgttcccttctcaggg

SEQ ID NO: 2628 - DNA, 23 bp, Artificial Sequence
  HLA-A targeting gRNA
ctgggcggggctcgggggctggg

SEQ ID NO: 2629 - DNA, 23 bp, Artificial Sequence
  HLA-A targeting gRNA
aatcttctattccctgagaaggg

SEQ ID NO: 2630 - DNA, 23 bp, Artificial Sequence
  HLA-A targeting gRNA
agcaaggggccctcctggcgggg

SEQ ID NO: 2631 - DNA, 23 bp, Artificial Sequence
  HLA-A targeting gRNA
aggaagagctcaggtggagaagg

SEQ ID NO: 2632 - DNA, 23 bp, Artificial Sequence
  HLA-A targeting gRNA
aggaccgggggagccgcgccggg

SEQ ID NO: 2633 - DNA, 23 bp, Artificial Sequence
  HLA-A targeting gRNA
ctgggtgggcccatgattgtggg

SEQ ID NO: 2634 - DNA, 23 bp, Artificial Sequence
  HLA-A targeting gRNA
ctggttggtcggggccgggcagg

SEQ ID NO: 2635 - DNA, 23 bp, Artificial Sequence
  HLA-A targeting gRNA
caagatggccacatgcgtgctgg

SEQ ID NO: 2636 - DNA, 23 bp, Artificial Sequence
  HLA-A targeting gRNA
caggaccgggggagccgcgccgg

SEQ ID NO: 2637 - DNA, 23 bp, Artificial Sequence
  HLA-A targeting gRNA
ctggttgtagtagccgtgcaggg

SEQ ID NO: 2638 - DNA, 23 bp, Artificial Sequence
  HLA-A targeting gRNA
cccggtcctgcgcccccgccagg

SEQ ID NO: 2639 - DNA, 23 bp, Artificial Sequence
  HLA-A targeting gRNA
ctgtggagatcacactgacctgg

SEQ ID NO: 2640 - DNA, 23 bp, Artificial Sequence
  HLA-A targeting gRNA
cctggcgggggcgcaggaccggg

SEQ ID NO: 2641 - DNA, 23 bp, Artificial Sequence
  HLA-A targeting gRNA
ctggcgggggcgcaggaccgggg

SEQ ID NO: 2642 - DNA, 23 bp, Artificial Sequence
  HLA-A targeting gRNA
gaagcaaggggccctcctggcgg

SEQ ID NO: 2643 - DNA, 23 bp, Artificial Sequence
  HLA-A targeting gRNA
gaagtcgctgttcccttctcagg

SEQ ID NO: 2644 - DNA, 23 bp, Artificial Sequence
  HLA-A targeting gRNA
cttaacccatctcagggtgaggg

SEQ ID NO: 2645 - DNA, 23 bp, Artificial Sequence
  HLA-A targeting gRNA
gagaagggaacagcgacttctgg

SEQ ID NO: 2646 - DNA, 23 bp, Artificial Sequence
  HLA-A targeting gRNA
gatggccacatgcgtgctggtgg

SEQ ID NO: 2647 - DNA, 23 bp, Artificial Sequence
  HLA-A targeting gRNA
gcaaggggccctcctggcggggg

SEQ ID NO: 2648 - DNA, 23 bp, Artificial Sequence
  HLA-A targeting gRNA
ggaagagctcaggtggagaaggg

SEQ ID NO: 2649 - DNA, 23 bp, Artificial Sequence
  HLA-A targeting gRNA
cttatcccatctcagggtgaggg

SEQ ID NO: 2650 - DNA, 23 bp, Artificial Sequence
  HLA-A targeting gRNA
cttcacactcaatatgtgtgggg

SEQ ID NO: 2651 - DNA, 23 bp, Artificial Sequence
  HLA-A targeting gRNA
ggagaagcaaggggccctcctgg

SEQ ID NO: 2652 - DNA, 23 bp, Artificial Sequence
  HLA-A targeting gRNA
ggccctcctggcgggggcgcagg

SEQ ID NO: 2653 - DNA, 23 bp, Artificial Sequence
  HLA-A targeting gRNA
ggtcctgcgcccccgccaggagg

SEQ ID NO: 2654 - DNA, 23 bp, Artificial Sequence
  HLA-A targeting gRNA
gtcctgcgcccccgccaggaggg

SEQ ID NO: 2655 - DNA, 23 bp, Artificial Sequence
  HLA-A targeting gRNA
cttcatcgccgtgggctacatgg

SEQ ID NO: 2656 - DNA, 23 bp, Artificial Sequence
  HLA-A targeting gRNA
taaaatctctgaaggagtgacgg

SEQ ID NO: 2657 - DNA, 23 bp, Artificial Sequence
  HLA-A targeting gRNA
cttcatcgctgtgggctacgtgg

SEQ ID NO: 2658 - DNA, 23 bp, Artificial Sequence
  HLA-A targeting gRNA
taatcttctattccctgagaagg

SEQ ID NO: 2659 - DNA, 23 bp, Artificial Sequence
  HLA-A targeting gRNA
tcctggcgggggcgcaggaccgg

SEQ ID NO: 2660 - DNA, 23 bp, Artificial Sequence
  HLA-A targeting gRNA
tgagtggttccctttgacaccgg

SEQ ID NO: 2661 - DNA, 23 bp, Artificial Sequence
  HLA-A targeting gRNA
tggcgggggcgcaggaccggggg

SEQ ID NO: 2662 - DNA, 23 bp, Artificial Sequence
  HLA-A targeting gRNA
tgtggtggtgccttctggagagg

SEQ ID NO: 2663 - DNA, 23 bp, Artificial Sequence
  HLA-A targeting gRNA
ggccgcctcccacttgcgcttgg

SEQ ID NO: 2664 - DNA, 23 bp, Artificial Sequence
  HLA-A targeting gRNA
cttcccacagttagaaaaggagg

SEQ ID NO: 2665 - DNA, 23 bp, Artificial Sequence
  HLA-A targeting gRNA
ggggccggagtattgggaccagg

SEQ ID NO: 2666 - DNA, 23 bp, Artificial Sequence
  HLA-A targeting gRNA
gtctcctggtcccaatactccgg

SEQ ID NO: 2667 - DNA, 23 bp, Artificial Sequence
  HLA-A targeting gRNA
aatcatgggccgacccagcctgg

SEQ ID NO: 2668 - DNA, 23 bp, Artificial Sequence
  HLA-A targeting gRNA
acacagggcccaggctgggtcgg

SEQ ID NO: 2669 - DNA, 23 bp, Artificial Sequence
  HLA-A targeting gRNA
atcatgggccgacccagcctggg

SEQ ID NO: 2670 - DNA, 23 bp, Artificial Sequence
  HLA-A targeting gRNA
gctgggtcggcccatgattgtgg

SEQ ID NO: 2671 - DNA, 23 bp, Artificial Sequence
  HLA-A targeting gRNA
cttgctggcctggttctctttgg

SEQ ID NO: 2672 - DNA, 23 bp, Artificial Sequence
  HLA-A targeting gRNA
tgtaaaggtgagagcttggaggg

SEQ ID NO: 2673 - DNA, 23 bp, Artificial Sequence
  HLA-A targeting gRNA
ttggagggcctgatgtgtgttgg

SEQ ID NO: 2674 - DNA, 23 bp, Artificial Sequence
  HLA-A targeting gRNA
cttgtggagaccaagcctgcagg

SEQ ID NO: 2675 - DNA, 23 bp, Artificial Sequence
  HLA-A targeting gRNA
aattcatatccatcacagtgagg

SEQ ID NO: 2676 - DNA, 23 bp, Artificial Sequence
  HLA-A targeting gRNA
attcatatccatcacagtgaggg

SEQ ID NO: 2677 - DNA, 23 bp, Artificial Sequence
  HLA-A targeting gRNA
ttcatatccatcacagtgagggg

SEQ ID NO: 2678 - DNA, 23 bp, Artificial Sequence
  HLA-A targeting gRNA
ccaggagacacggaatgtgaagg

SEQ ID NO: 2679 - DNA, 23 bp, Artificial Sequence
  HLA-A targeting gRNA
ccttcacattccgtgtctcctgg

SEQ ID NO: 2680 - DNA, 23 bp, Artificial Sequence
  HLA-A targeting gRNA
ccctcctgaggtctgtcctcagg

SEQ ID NO: 2681 - DNA, 23 bp, Artificial Sequence
  HLA-A targeting gRNA
gaaaccggctaaaggcgcctggg

SEQ ID NO: 2682 - DNA, 23 bp, Artificial Sequence
  HLA-A targeting gRNA
ccctgaggacagacctcaggagg

SEQ ID NO: 2683 - DNA, 23 bp, Artificial Sequence
  HLA-A targeting gRNA
gaaaccgggttaaaggcgcctgg

SEQ ID NO: 2684 - DNA, 23 bp, Artificial Sequence
  HLA-A targeting gRNA
cctcctgaggtctgtcctcaggg

SEQ ID NO: 2685 - DNA, 23 bp, Artificial Sequence
  HLA-A targeting gRNA
cctgaggacagacctcaggaggg

SEQ ID NO: 2686 - DNA, 23 bp, Artificial Sequence
  HLA-A targeting gRNA
ctgtggtcgctgccgtgatgtgg

SEQ ID NO: 2687 - DNA, 23 bp, Artificial Sequence
  HLA-A targeting gRNA
ggtccctgaggacagacctcagg

SEQ ID NO: 2688 - DNA, 23 bp, Artificial Sequence
  HLA-A targeting gRNA
gaaccccgcttcatcgccgtggg

SEQ ID NO: 2689 - DNA, 23 bp, Artificial Sequence
  HLA-A targeting gRNA
tggtcgctgccgtgatgtggagg

SEQ ID NO: 2690 - DNA, 23 bp, Artificial Sequence
  HLA-A targeting gRNA
cactcggtcagtctgtgactggg

SEQ ID NO: 2691 - DNA, 23 bp, Artificial Sequence
  HLA-A targeting gRNA
ccactcggtcagtctgtgactgg

SEQ ID NO: 2692 - DNA, 23 bp, Artificial Sequence
  HLA-A targeting gRNA
ccagtcacagactgaccgagtgg

SEQ ID NO: 2693 - DNA, 23 bp, Artificial Sequence
  HLA-A targeting gRNA
aaccctcctcctgctactctcgg

SEQ ID NO: 2694 - DNA, 23 bp, Artificial Sequence
  HLA-A targeting gRNA
acactccaccagcacgcatgtgg

SEQ ID NO: 2695 - DNA, 23 bp, Artificial Sequence
  HLA-A targeting gRNA
accctcctcctgctactctcggg

SEQ ID NO: 2696 - DNA, 23 bp, Artificial Sequence
  HLA-A targeting gRNA
cccccgagagtagcaggaggagg

SEQ ID NO: 2697 - DNA, 23 bp, Artificial Sequence
  HLA-A targeting gRNA
ccccgagagtagcaggaggaggg

SEQ ID NO: 2698 - DNA, 23 bp, Artificial Sequence
  HLA-A targeting gRNA
ccctcctcctgctactctcgggg

SEQ ID NO: 2699 - DNA, 23 bp, Artificial Sequence
  HLA-A targeting gRNA
cctcctcctgctactctcggggg

SEQ ID NO: 2700 - DNA, 23 bp, Artificial Sequence
  HLA-A targeting gRNA
gaagagctcaggtggagaagggg

SEQ ID NO: 2701 - DNA, 23 bp, Artificial Sequence
  HLA-A targeting gRNA
gggcccccgagagtagcaggagg

SEQ ID NO: 2702 - DNA, 23 bp, Artificial Sequence
  HLA-A targeting gRNA
gaagcaccacccacaatcatggg

SEQ ID NO: 2703 - DNA, 23 bp, Artificial Sequence
  HLA-A targeting gRNA
ataatgtatggctgcgacgtggg

SEQ ID NO: 2704 - DNA, 23 bp, Artificial Sequence
  HLA-A targeting gRNA
cacaccatccagataatgtatgg

SEQ ID NO: 2705 - DNA, 23 bp, Artificial Sequence
  HLA-A targeting gRNA
cgtcgcagccatacattatctgg

SEQ ID NO: 2706 - DNA, 23 bp, Artificial Sequence
  HLA-A targeting gRNA
gataatgtatggctgcgacgtgg

SEQ ID NO: 2707 - DNA, 23 bp, Artificial Sequence
  HLA-A targeting gRNA
gcagccatacattatctggatgg

SEQ ID NO: 2708 - DNA, 23 bp, Artificial Sequence
  HLA-A targeting gRNA
gaagcagggctccccgcggccgg

SEQ ID NO: 2709 - DNA, 23 bp, Artificial Sequence
  HLA-A targeting gRNA
taatgtatggctgcgacgtgggg

SEQ ID NO: 2710 - DNA, 23 bp, Artificial Sequence
  HLA-A targeting gRNA
cccggcgggggcgcaggacccgg

SEQ ID NO: 2711 - DNA, 23 bp, Artificial Sequence
  HLA-A targeting gRNA
cccgggtcctgcgcccccgccgg

SEQ ID NO: 2712 - DNA, 23 bp, Artificial Sequence
  HLA-A targeting gRNA
ccggcgggggcgcaggacccggg

SEQ ID NO: 2713 - DNA, 23 bp, Artificial Sequence
  HLA-A targeting gRNA
ccgggtcctgcgcccccgccggg

SEQ ID NO: 2714 - DNA, 23 bp, Artificial Sequence
  HLA-A targeting gRNA
gaagcggggttccccgcggccgg

SEQ ID NO: 2715 - DNA, 23 bp, Artificial Sequence
  HLA-A targeting gRNA
gaaggaaacgctgcagcgcacgg

SEQ ID NO: 2716 - DNA, 23 bp, Artificial Sequence
  HLA-A targeting gRNA
gcaaggggcccgcccggcggggg

SEQ ID NO: 2717 - DNA, 23 bp, Artificial Sequence
  HLA-A targeting gRNA
ggcccgcccggcgggggcgcagg

SEQ ID NO: 2718 - DNA, 23 bp, Artificial Sequence
  HLA-A targeting gRNA
gaaggagatgctgcagcgcacgg

SEQ ID NO: 2719 - DNA, 23 bp, Artificial Sequence
  HLA-A targeting gRNA
ggtcctgcgcccccgccgggcgg

SEQ ID NO: 2720 - DNA, 23 bp, Artificial Sequence
  HLA-A targeting gRNA
gtcctgcgcccccgccgggcggg

SEQ ID NO: 2721 - DNA, 23 bp, Artificial Sequence
  HLA-A targeting gRNA
gaagtcgctgttccctcgtcagg

SEQ ID NO: 2722 - DNA, 23 bp, Artificial Sequence
  HLA-A targeting gRNA
gaagtcgctgttccctctgcagg

SEQ ID NO: 2723 - DNA, 23 bp, Artificial Sequence
  HLA-A targeting gRNA
gaatgtgaagaaatacctcatgg

SEQ ID NO: 2724 - DNA, 23 bp, Artificial Sequence
  HLA-A targeting gRNA
ggagtgggagcctggggacgagg

SEQ ID NO: 2725 - DNA, 23 bp, Artificial Sequence
  HLA-A targeting gRNA
gaccagggcgggtgagtgcgggg

SEQ ID NO: 2726 - DNA, 23 bp, Artificial Sequence
  HLA-A targeting gRNA
gacccacccggggggatttttgg

SEQ ID NO: 2727 - DNA, 23 bp, Artificial Sequence
  HLA-A targeting gRNA
gacccagttctcactccaattgg

SEQ ID NO: 2728 - DNA, 23 bp, Artificial Sequence
  HLA-A targeting gRNA
gacccagttctcactcctattgg

SEQ ID NO: 2729 - DNA, 23 bp, Artificial Sequence
  HLA-A targeting gRNA
gaccccgcactcacccgccctgg

SEQ ID NO: 2730 - DNA, 23 bp, Artificial Sequence
  HLA-A targeting gRNA
gacccctcatcccctacggacgg

SEQ ID NO: 2731 - DNA, 23 bp, Artificial Sequence
  HLA-A targeting gRNA
gacccctcattccccacggacgg

SEQ ID NO: 2732 - DNA, 23 bp, Artificial Sequence
  HLA-A targeting gRNA
gggagcctggggacgaggagtgg

SEQ ID NO: 2733 - DNA, 23 bp, Artificial Sequence
  HLA-A targeting gRNA
gaccgcctcccacttgcgcttgg

SEQ ID NO: 2734 - DNA, 23 bp, Artificial Sequence
  HLA-A targeting gRNA
gaccgggctgaccgcggggtcgg

SEQ ID NO: 2735 - DNA, 23 bp, Artificial Sequence
  HLA-A targeting gRNA
gacctgacagcgggatggggagg

SEQ ID NO: 2736 - DNA, 23 bp, Artificial Sequence
  HLA-A targeting gRNA
gacctggcagcgggatagggagg

SEQ ID NO: 2737 - DNA, 23 bp, Artificial Sequence
  HLA-A targeting gRNA
gacgagggaacagcgacttctgg

SEQ ID NO: 2738 - DNA, 23 bp, Artificial Sequence
  HLA-A targeting gRNA
gacgccgaggatggccatcatgg

SEQ ID NO: 2739 - DNA, 23 bp, Artificial Sequence
  HLA-A targeting gRNA
gactccgagacccttgccccggg

SEQ ID NO: 2740 - DNA, 23 bp, Artificial Sequence
  HLA-A targeting gRNA
gactccgagacccttgtcccggg

SEQ ID NO: 2741 - DNA, 23 bp, Artificial Sequence
  HLA-A targeting gRNA
gacttgtgactgctgggttcagg

SEQ ID NO: 2742 - DNA, 23 bp, Artificial Sequence
  HLA-A targeting gRNA
gagaccaagcctgcaggggatgg

SEQ ID NO: 2743 - DNA, 23 bp, Artificial Sequence
  HLA-A targeting gRNA
gagactgaccgagtggacctggg

SEQ ID NO: 2744 - DNA, 23 bp, Artificial Sequence
  HLA-A targeting gRNA
gccgggccgggacacggatgtgg

SEQ ID NO: 2745 - DNA, 23 bp, Artificial Sequence
  HLA-A targeting gRNA
gagccaaaggatggagccgcggg

SEQ ID NO: 2746 - DNA, 23 bp, Artificial Sequence
  HLA-A targeting gRNA
gagccagaagatggagccgcggg

SEQ ID NO: 2747 - DNA, 23 bp, Artificial Sequence
  HLA-A targeting gRNA
ctcagccactcctcgcccccagg

SEQ ID NO: 2748 - DNA, 23 bp, Artificial Sequence
  HLA-A targeting gRNA
caccctccctctggtcctgaggg

SEQ ID NO: 2749 - DNA, 23 bp, Artificial Sequence
  HLA-A targeting gRNA
ctagaatatcaccctccctctgg

SEQ ID NO: 2750 - DNA, 23 bp, Artificial Sequence
  HLA-A targeting gRNA
gagccccgcttcatcgctgtggg

SEQ ID NO: 2751 - DNA, 23 bp, Artificial Sequence
  HLA-A targeting gRNA
tcaccctccctctggtcctgagg

SEQ ID NO: 2752 - DNA, 23 bp, Artificial Sequence
  HLA-A targeting gRNA
ctcaggtggagaaggggtgaagg

SEQ ID NO: 2753 - DNA, 23 bp, Artificial Sequence
  HLA-A targeting gRNA
gagccctgcttcatcgccgtggg

SEQ ID NO: 2754 - DNA, 23 bp, Artificial Sequence
  HLA-A targeting gRNA
ggtggagaaggggtgaagggtgg

SEQ ID NO: 2755 - DNA, 23 bp, Artificial Sequence
  HLA-A targeting gRNA
gtggagaaggggtgaagggtggg

SEQ ID NO: 2756 - DNA, 23 bp, Artificial Sequence
  HLA-A targeting gRNA
gagctaccagaaaggagccaggg

SEQ ID NO: 2757 - DNA, 23 bp, Artificial Sequence
  HLA-A targeting gRNA
tcaggtggagaaggggtgaaggg

SEQ ID NO: 2758 - DNA, 23 bp, Artificial Sequence
  HLA-A targeting gRNA
tggagaaggggtgaagggtgggg

SEQ ID NO: 2759 - DNA, 23 bp, Artificial Sequence
  HLA-A targeting gRNA
gggagcctgggggcgaggagtgg

SEQ ID NO: 2760 - DNA, 23 bp, Artificial Sequence
  HLA-A targeting gRNA
gaggacagacctcaggagggcgg

SEQ ID NO: 2761 - DNA, 23 bp, Artificial Sequence
  HLA-A targeting gRNA
gaggacggtgaccccggcccggg

SEQ ID NO: 2762 - DNA, 23 bp, Artificial Sequence
  HLA-A targeting gRNA
ggagaaatacctcatggagtggg

SEQ ID NO: 2763 - DNA, 23 bp, Artificial Sequence
  HLA-A targeting gRNA
tggagaaatacctcatggagtgg

SEQ ID NO: 2764 - DNA, 23 bp, Artificial Sequence
  HLA-A targeting gRNA
gaggatgtatggttgcgacgtgg

SEQ ID NO: 2765 - DNA, 23 bp, Artificial Sequence
  HLA-A targeting gRNA
gaggccaggcctgcaggggatgg

SEQ ID NO: 2766 - DNA, 23 bp, Artificial Sequence
  HLA-A targeting gRNA
ggagggtgatattctagtgttgg

SEQ ID NO: 2767 - DNA, 23 bp, Artificial Sequence
  HLA-A targeting gRNA
caccaagcgcaagtgggaggcgg

SEQ ID NO: 2768 - DNA, 23 bp, Artificial Sequence
  HLA-A targeting gRNA
gaggcccaggcgcctttagccgg

SEQ ID NO: 2769 - DNA, 23 bp, Artificial Sequence
  HLA-A targeting gRNA
ctcagatcaccaagcgcaagtgg

SEQ ID NO: 2770 - DNA, 23 bp, Artificial Sequence
  HLA-A targeting gRNA
gatcaccaagcgcaagtgggagg

SEQ ID NO: 2771 - DNA, 23 bp, Artificial Sequence
  HLA-A targeting gRNA
tcagatcaccaagcgcaagtggg

SEQ ID NO: 2772 - DNA, 23 bp, Artificial Sequence
  HLA-A targeting gRNA
gaggggccggagtattgggacgg

SEQ ID NO: 2773 - DNA, 23 bp, Artificial Sequence
  HLA-A targeting gRNA
ggatgtggagaaatacctcatgg

SEQ ID NO: 2774 - DNA, 23 bp, Artificial Sequence
  HLA-A targeting gRNA
aagcaaggggcccgcccggcggg

SEQ ID NO: 2775 - DNA, 23 bp, Artificial Sequence
  HLA-A targeting gRNA
agcaaggggcccgcccggcgggg

SEQ ID NO: 2776 - DNA, 23 bp, Artificial Sequence
  HLA-A targeting gRNA
gagggttcggggcgccatgatgg

SEQ ID NO: 2777 - DNA, 23 bp, Artificial Sequence
  HLA-A targeting gRNA
gagggttcggggcggcatgacgg

SEQ ID NO: 2778 - DNA, 23 bp, Artificial Sequence
  HLA-A targeting gRNA
gaagcaaggggcccgcccggcgg

SEQ ID NO: 2779 - DNA, 23 bp, Artificial Sequence
  HLA-A targeting gRNA
gaggtgggtgagctcccccatgg

SEQ ID NO: 2780 - DNA, 23 bp, Artificial Sequence
  HLA-A targeting gRNA
ggagaagcaaggggcccgcccgg

SEQ ID NO: 2781 - DNA, 23 bp, Artificial Sequence
  HLA-A targeting gRNA
agtattgggaccaggagacacgg

SEQ ID NO: 2782 - DNA, 23 bp, Artificial Sequence
  HLA-A targeting gRNA
gagtcactctctggaaacccagg

SEQ ID NO: 2783 - DNA, 23 bp, Artificial Sequence
  HLA-A targeting gRNA
gagtcatatgcgtcctggggggg

SEQ ID NO: 2784 - DNA, 23 bp, Artificial Sequence
  HLA-A targeting gRNA
gagtggcccgaccctcctcccgg

SEQ ID NO: 2785 - DNA, 23 bp, Artificial Sequence
  HLA-A targeting gRNA
aagagcgcaggtcctcgttcagg

SEQ ID NO: 2786 - DNA, 23 bp, Artificial Sequence
  HLA-A targeting gRNA
agagcgcaggtcctcgttcaggg

SEQ ID NO: 2787 - DNA, 23 bp, Artificial Sequence
  HLA-A targeting gRNA
gatcacactgacctgacagcggg

SEQ ID NO: 2788 - DNA, 23 bp, Artificial Sequence
  HLA-A targeting gRNA
gatcaccaagcacaagtgggagg

SEQ ID NO: 2789 - DNA, 23 bp, Artificial Sequence
  HLA-A targeting gRNA
gatcaccgagcgcaagtgggagg

SEQ ID NO: 2790 - DNA, 23 bp, Artificial Sequence
  HLA-A targeting gRNA
gatgatgtatggctgccacgtgg

SEQ ID NO: 2791 - DNA, 23 bp, Artificial Sequence
  HLA-A targeting gRNA
gatgcccacaatggggatggtgg

SEQ ID NO: 2792 - DNA, 23 bp, Artificial Sequence
  HLA-A targeting gRNA
gatgcccacgatgtggacggtgg

SEQ ID NO: 2793 - DNA, 23 bp, Artificial Sequence
  HLA-A targeting gRNA
gatgctgtgagaacctggcccgg

SEQ ID NO: 2794 - DNA, 23 bp, Artificial Sequence
  HLA-A targeting gRNA
gatggacaggacacctgggatgg

SEQ ID NO: 2795 - DNA, 23 bp, Artificial Sequence
  HLA-A targeting gRNA
gatggccatcctcggcgtctggg

SEQ ID NO: 2796 - DNA, 23 bp, Artificial Sequence
  HLA-A targeting gRNA
gatgggataaggagggagatggg

SEQ ID NO: 2797 - DNA, 23 bp, Artificial Sequence
  HLA-A targeting gRNA
gatgggttaaggagggagatggg

SEQ ID NO: 2798 - DNA, 23 bp, Artificial Sequence
  HLA-A targeting gRNA
gatgtaatccttgccgtcttagg

SEQ ID NO: 2799 - DNA, 23 bp, Artificial Sequence
  HLA-A targeting gRNA
gatgtaatccttgccttcgtagg

SEQ ID NO: 2800 - DNA, 23 bp, Artificial Sequence
  HLA-A targeting gRNA
gatgtgtgttgggtgttgggggg

SEQ ID NO: 2801 - DNA, 23 bp, Artificial Sequence
  HLA-A targeting gRNA
gatgtgtgttgggtgttgggtgg

SEQ ID NO: 2802 - DNA, 23 bp, Artificial Sequence
  HLA-A targeting gRNA
gattgtgggtggtgcttcccagg

SEQ ID NO: 2803 - DNA, 23 bp, Artificial Sequence
  HLA-A targeting gRNA
gcaaccatacatcctctggatgg

SEQ ID NO: 2804 - DNA, 23 bp, Artificial Sequence
  HLA-A targeting gRNA
gcaagggtctcggagtcccgcgg

SEQ ID NO: 2805 - DNA, 23 bp, Artificial Sequence
  HLA-A targeting gRNA
gcaagtgggaggcggcccgttgg

SEQ ID NO: 2806 - DNA, 23 bp, Artificial Sequence
  HLA-A targeting gRNA
gcacagaacccagaccagcctgg

SEQ ID NO: 2807 - DNA, 23 bp, Artificial Sequence
  HLA-A targeting gRNA
gcacaggtaccaggggccacggg

SEQ ID NO: 2808 - DNA, 23 bp, Artificial Sequence
  HLA-A targeting gRNA
gcacctgcatgtgtctgtgttgg

SEQ ID NO: 2809 - DNA, 23 bp, Artificial Sequence
  HLA-A targeting gRNA
gcacgagtaccaggggccacggg

SEQ ID NO: 2810 - DNA, 23 bp, Artificial Sequence
  HLA-A targeting gRNA
gcacgcatgtggccattttgagg

SEQ ID NO: 2811 - DNA, 23 bp, Artificial Sequence
  HLA-A targeting gRNA
gcacgggtaccagggaccacggg

SEQ ID NO: 2812 - DNA, 23 bp, Artificial Sequence
  HLA-A targeting gRNA
gcactcacccgccctggtctggg

SEQ ID NO: 2813 - DNA, 23 bp, Artificial Sequence
  HLA-A targeting gRNA
gcactggtaccaggggccacggg

SEQ ID NO: 2814 - DNA, 23 bp, Artificial Sequence
  HLA-A targeting gRNA
aaggctgctgccggtgtcaaagg

SEQ ID NO: 2815 - DNA, 23 bp, Artificial Sequence
  HLA-A targeting gRNA
gcagagggaacagcgacttctgg

SEQ ID NO: 2816 - DNA, 23 bp, Artificial Sequence
  HLA-A targeting gRNA
gcagcacgcctacgacggcaagg

SEQ ID NO: 2817 - DNA, 23 bp, Artificial Sequence
  HLA-A targeting gRNA
aatggacaggacacccgggatgg

SEQ ID NO: 2818 - DNA, 23 bp, Artificial Sequence
  HLA-A targeting gRNA
aatgtgccctgtctcattactgg

SEQ ID NO: 2819 - DNA, 23 bp, Artificial Sequence
  HLA-A targeting gRNA
agcttgtaaaggtgagagcttgg

SEQ ID NO: 2820 - DNA, 23 bp, Artificial Sequence
  HLA-A targeting gRNA
aggctgctgccggtgtcaaaggg

SEQ ID NO: 2821 - DNA, 23 bp, Artificial Sequence
  HLA-A targeting gRNA
atggacaggacacccgggatggg

SEQ ID NO: 2822 - DNA, 23 bp, Artificial Sequence
  HLA-A targeting gRNA
atgtgccctgtctcattactggg

SEQ ID NO: 2823 - DNA, 23 bp, Artificial Sequence
  HLA-A targeting gRNA
caagactaggaggttcctctagg

SEQ ID NO: 2824 - DNA, 23 bp, Artificial Sequence
  HLA-A targeting gRNA
gcagcggagagtctacctggagg

SEQ ID NO: 2825 - DNA, 23 bp, Artificial Sequence
  HLA-A targeting gRNA
cgggaagagtcagaaaattcagg

SEQ ID NO: 2826 - DNA, 23 bp, Artificial Sequence
  HLA-A targeting gRNA
ctagaggaacctcctagtcttgg

SEQ ID NO: 2827 - DNA, 23 bp, Artificial Sequence
  HLA-A targeting gRNA
gcaggacgcctaagacggcaagg

SEQ ID NO: 2828 - DNA, 23 bp, Artificial Sequence
  HLA-A targeting gRNA
gcaggacgcctacgaaggcaagg

SEQ ID NO: 2829 - DNA, 23 bp, Artificial Sequence
  HLA-A targeting gRNA
ctccagtgatcacagctccaagg

SEQ ID NO: 2830 - DNA, 23 bp, Artificial Sequence
  HLA-A targeting gRNA
ctccttggagctgtgatcactgg

SEQ ID NO: 2831 - DNA, 23 bp, Artificial Sequence
  HLA-A targeting gRNA
ctctggggtccaagactaggagg

SEQ ID NO: 2832 - DNA, 23 bp, Artificial Sequence
  HLA-A targeting gRNA
gcaggaggagccggagtattggg

SEQ ID NO: 2833 - DNA, 23 bp, Artificial Sequence
  HLA-A targeting gRNA
ctgtgctctcttccccatcccgg

SEQ ID NO: 2834 - DNA, 23 bp, Artificial Sequence
  HLA-A targeting gRNA
cttctctggggtccaagactagg

SEQ ID NO: 2835 - DNA, 23 bp, Artificial Sequence
  HLA-A targeting gRNA
gcatgtggccatcttgagaatgg

SEQ ID NO: 2836 - DNA, 23 bp, Artificial Sequence
  HLA-A targeting gRNA
ggagacctttagcagggtcaggg

SEQ ID NO: 2837 - DNA, 23 bp, Artificial Sequence
  HLA-A targeting gRNA
gtgcttcccagtaatgagacagg

SEQ ID NO: 2838 - DNA, 23 bp, Artificial Sequence
  HLA-A targeting gRNA
gcaggtcgcctacgacggcaagg

SEQ ID NO: 2839 - DNA, 23 bp, Artificial Sequence
  HLA-A targeting gRNA
tatctctgctcctctccagaagg

SEQ ID NO: 2840 - DNA, 23 bp, Artificial Sequence
  HLA-A targeting gRNA
tgagaatggacaggacacccggg

SEQ ID NO: 2841 - DNA, 23 bp, Artificial Sequence
  HLA-A targeting gRNA
gcatctccttcccgttctccagg

SEQ ID NO: 2842 - DNA, 23 bp, Artificial Sequence
  HLA-A targeting gRNA
tgcttcccagtaatgagacaggg

SEQ ID NO: 2843 - DNA, 23 bp, Artificial Sequence
  HLA-A targeting gRNA
gcatgtggccattttgaggatgg

SEQ ID NO: 2844 - DNA, 23 bp, Artificial Sequence
  HLA-A targeting gRNA
tggacaggacacccgggatgggg

SEQ ID NO: 2845 - DNA, 23 bp, Artificial Sequence
  HLA-A targeting gRNA
tggagacctttagcagggtcagg

SEQ ID NO: 2846 - DNA, 23 bp, Artificial Sequence
  HLA-A targeting gRNA
tggccatcttgagaatggacagg

SEQ ID NO: 2847 - DNA, 23 bp, Artificial Sequence
  HLA-A targeting gRNA
gcatgtgtctgtgttggtgtagg

SEQ ID NO: 2848 - DNA, 23 bp, Artificial Sequence
  HLA-A targeting gRNA
tgtcctgtccattctcaagatgg

SEQ ID NO: 2849 - DNA, 23 bp, Artificial Sequence
  HLA-A targeting gRNA
gccagcaaggatgcccacgatgg

SEQ ID NO: 2850 - DNA, 23 bp, Artificial Sequence
  HLA-A targeting gRNA
gccagcaatgatgcccacaatgg

SEQ ID NO: 2851 - DNA, 23 bp, Artificial Sequence
  HLA-A targeting gRNA
tgtgctctcttccccatcccggg

SEQ ID NO: 2852 - DNA, 23 bp, Artificial Sequence
  HLA-A targeting gRNA
ttgacaccggcagcagccttggg

SEQ ID NO: 2853 - DNA, 23 bp, Artificial Sequence
  HLA-A targeting gRNA
ttgagaatggacaggacacccgg

SEQ ID NO: 2854 - DNA, 23 bp, Artificial Sequence
  HLA-A targeting gRNA
ttgtaaaggtgagagcttggagg

SEQ ID NO: 2855 - DNA, 23 bp, Artificial Sequence
  HLA-A targeting gRNA
tttgacaccggcagcagccttgg

SEQ ID NO: 2856 - DNA, 23 bp, Artificial Sequence
  HLA-A targeting gRNA
gtgtcttgggggggtctgacggg

SEQ ID NO: 2857 - DNA, 23 bp, Artificial Sequence
  HLA-A targeting gRNA
tgtgtcttgggggggtctgacgg

SEQ ID NO: 2858 - DNA, 23 bp, Artificial Sequence
  HLA-A targeting gRNA
atgtttcctgatcctgccctggg

SEQ ID NO: 2859 - DNA, 23 bp, Artificial Sequence
  HLA-A targeting gRNA
gccccgccccgacccacccgggg

SEQ ID NO: 2860 - DNA, 23 bp, Artificial Sequence
  HLA-A targeting gRNA
catgtttcctgatcctgccctgg

SEQ ID NO: 2861 - DNA, 23 bp, Artificial Sequence
  HLA-A targeting gRNA
gcccggccccgaccaaccagggg

SEQ ID NO: 2862 - DNA, 23 bp, Artificial Sequence
  HLA-A targeting gRNA
gcccgtccgtaggggatgagggg

SEQ ID NO: 2863 - DNA, 23 bp, Artificial Sequence
  HLA-A targeting gRNA
gcccgtccgtggggaatgagggg

SEQ ID NO: 2864 - DNA, 23 bp, Artificial Sequence
  HLA-A targeting gRNA
gcgcgatccgcaggttctctcgg

SEQ ID NO: 2865 - DNA, 23 bp, Artificial Sequence
  HLA-A targeting gRNA
gccctgacccagaccagggcggg

SEQ ID NO: 2866 - DNA, 23 bp, Artificial Sequence
  HLA-A targeting gRNA
cctctctggagacctttagcagg

SEQ ID NO: 2867 - DNA, 23 bp, Artificial Sequence
  HLA-A targeting gRNA
cctgctaaaggtctccagagagg

SEQ ID NO: 2868 - DNA, 23 bp, Artificial Sequence
  HLA-A targeting gRNA
ctctctggagacctttagcaggg

SEQ ID NO: 2869 - DNA, 23 bp, Artificial Sequence
  HLA-A targeting gRNA
gccggtttcattttcagtttagg

SEQ ID NO: 2870 - DNA, 23 bp, Artificial Sequence
  HLA-A targeting gRNA
gggtcatatgtgtcttggggggg

SEQ ID NO: 2871 - DNA, 23 bp, Artificial Sequence
  HLA-A targeting gRNA
ggtgggtcatatgtgtcttgggg

SEQ ID NO: 2872 - DNA, 23 bp, Artificial Sequence
  HLA-A targeting gRNA
gtgggtcatatgtgtcttggggg

SEQ ID NO: 2873 - DNA, 23 bp, Artificial Sequence
  HLA-A targeting gRNA
gtggtgggtcatatgtgtcttgg

SEQ ID NO: 2874 - DNA, 23 bp, Artificial Sequence
  HLA-A targeting gRNA
gcctgtgtccaggctggtctggg

SEQ ID NO: 2875 - DNA, 23 bp, Artificial Sequence
  HLA-A targeting gRNA
tgggtcatatgtgtcttgggggg

SEQ ID NO: 2876 - DNA, 23 bp, Artificial Sequence
  HLA-A targeting gRNA
tggtgggtcatatgtgtcttggg

SEQ ID NO: 2877 - DNA, 23 bp, Artificial Sequence
  HLA-A targeting gRNA
gcgacctggcccgtccgtagggg

SEQ ID NO: 2878 - DNA, 23 bp, Artificial Sequence
  HLA-A targeting gRNA
acagggcacatttctagctgggg

SEQ ID NO: 2879 - DNA, 23 bp, Artificial Sequence
  HLA-A targeting gRNA
acatttctggaaacttctctggg

SEQ ID NO: 2880 - DNA, 23 bp, Artificial Sequence
  HLA-A targeting gRNA
agacagggcacatttctagctgg

SEQ ID NO: 2881 - DNA, 23 bp, Artificial Sequence
  HLA-A targeting gRNA
agggaaagcaggagcctctctgg

SEQ ID NO: 2882 - DNA, 23 bp, Artificial Sequence
  HLA-A targeting gRNA
gcgatcagggaggcgccctgtgg

SEQ ID NO: 2883 - DNA, 23 bp, Artificial Sequence
  HLA-A targeting gRNA
agggaatagaagattatcccagg

SEQ ID NO: 2884 - DNA, 23 bp, Artificial Sequence
  HLA-A targeting gRNA
atgggggtgtcatgtctcttagg

SEQ ID NO: 2885 - DNA, 23 bp, Artificial Sequence
  HLA-A targeting gRNA
attgctggcctggttctccttgg

SEQ ID NO: 2886 - DNA, 23 bp, Artificial Sequence
  HLA-A targeting gRNA
cacatttctggaaacttctctgg

SEQ ID NO: 2887 - DNA, 23 bp, Artificial Sequence
  HLA-A targeting gRNA
gcgcccgcggctccatcctttgg

SEQ ID NO: 2888 - DNA, 23 bp, Artificial Sequence
  HLA-A targeting gRNA
gcgcccgcggctccatcttctgg

SEQ ID NO: 2889 - DNA, 23 bp, Artificial Sequence
  HLA-A targeting gRNA
catttctggaaacttctctgggg

SEQ ID NO: 2890 - DNA, 23 bp, Artificial Sequence
  HLA-A targeting gRNA
gacagggcacatttctagctggg

SEQ ID NO: 2891 - DNA, 23 bp, Artificial Sequence
  HLA-A targeting gRNA
gcacatttctagctggggcttgg

SEQ ID NO: 2892 - DNA, 23 bp, Artificial Sequence
  HLA-A targeting gRNA
tcacagctccaaggagaaccagg

SEQ ID NO: 2893 - DNA, 23 bp, Artificial Sequence
  HLA-A targeting gRNA
tcatgtctcttagggaaagcagg

SEQ ID NO: 2894 - DNA, 23 bp, Artificial Sequence
  HLA-A targeting gRNA
tgggggtgtcatgtctcttaggg

SEQ ID NO: 2895 - DNA, 23 bp, Artificial Sequence
  HLA-A targeting gRNA
gcgcgatccgcagtttctctcgg

SEQ ID NO: 2896 - DNA, 23 bp, Artificial Sequence
  HLA-A targeting gRNA
gcgcgggtaccaggggccacagg

SEQ ID NO: 2897 - DNA, 23 bp, Artificial Sequence
  HLA-A targeting gRNA
gcggagtctcccacttgcgctgg

SEQ ID NO: 2898 - DNA, 23 bp, Artificial Sequence
  HLA-A targeting gRNA
cgcctctgcggggagaagcaagg

SEQ ID NO: 2899 - DNA, 23 bp, Artificial Sequence
  HLA-A targeting gRNA
gcggagttggggaatctccaagg

SEQ ID NO: 2900 - DNA, 23 bp, Artificial Sequence
  HLA-A targeting gRNA
cttgcttctccccgcagaggcgg

SEQ ID NO: 2901 - DNA, 23 bp, Artificial Sequence
  HLA-A targeting gRNA
gcggctgtggtggtaccttctgg

SEQ ID NO: 2902 - DNA, 23 bp, Artificial Sequence
  HLA-A targeting gRNA
gcgtcctgggggggtctgtcagg

SEQ ID NO: 2903 - DNA, 23 bp, Artificial Sequence
  HLA-A targeting gRNA
gcgtctccttaccgttctccagg

SEQ ID NO: 2904 - DNA, 23 bp, Artificial Sequence
  HLA-A targeting gRNA
gcgtctccttcccgttcttcagg

SEQ ID NO: 2905 - DNA, 23 bp, Artificial Sequence
  HLA-A targeting gRNA
agagtagcaggaggagggttcgg

SEQ ID NO: 2906 - DNA, 23 bp, Artificial Sequence
  HLA-A targeting gRNA
gcgtttccttcccgttctccagg

SEQ ID NO: 2907 - DNA, 23 bp, Artificial Sequence
  HLA-A targeting gRNA
gcgttttgggggcgtctctcagg

SEQ ID NO: 2908 - DNA, 23 bp, Artificial Sequence
  HLA-A targeting gRNA
agtagcaggaggagggttcgggg

SEQ ID NO: 2909 - DNA, 23 bp, Artificial Sequence
  HLA-A targeting gRNA
gagtagcaggaggagggttcggg

SEQ ID NO: 2910 - DNA, 23 bp, Artificial Sequence
  HLA-A targeting gRNA
agagccccgcttcatcgcagtgg

SEQ ID NO: 2911 - DNA, 23 bp, Artificial Sequence
  HLA-A targeting gRNA
gctatggggtttctttgcgttgg

SEQ ID NO: 2912 - DNA, 23 bp, Artificial Sequence
  HLA-A targeting gRNA
gctccctccttttctaactgtgg

SEQ ID NO: 2913 - DNA, 23 bp, Artificial Sequence
  HLA-A targeting gRNA
gctcctttctggtagctcacagg

SEQ ID NO: 2914 - DNA, 23 bp, Artificial Sequence
  HLA-A targeting gRNA
gctcttcttcctccacatcacgg

SEQ ID NO: 2915 - DNA, 23 bp, Artificial Sequence
  HLA-A targeting gRNA
gctgcagcgcacaggtaccaggg

SEQ ID NO: 2916 - DNA, 23 bp, Artificial Sequence
  HLA-A targeting gRNA
gctgcagcgcacgagtaccaggg

SEQ ID NO: 2917 - DNA, 23 bp, Artificial Sequence
  HLA-A targeting gRNA
gctgcagcgcactggtaccaggg

SEQ ID NO: 2918 - DNA, 23 bp, Artificial Sequence
  HLA-A targeting gRNA
gctgccacgtggggtcggacggg

SEQ ID NO: 2919 - DNA, 23 bp, Artificial Sequence
  HLA-A targeting gRNA
gctgggcggggctcgggggctgg

SEQ ID NO: 2920 - DNA, 23 bp, Artificial Sequence
  HLA-A targeting gRNA
gctgggctgaccgcggggtcggg

SEQ ID NO: 2921 - DNA, 23 bp, Artificial Sequence
  HLA-A targeting gRNA
gctgggtgggcccatgattgtgg

SEQ ID NO: 2922 - DNA, 23 bp, Artificial Sequence
  HLA-A targeting gRNA
gcttcacactcaatatgtgtggg

SEQ ID NO: 2923 - DNA, 23 bp, Artificial Sequence
  HLA-A targeting gRNA
ggaaacttctctggggtccaagg

SEQ ID NO: 2924 - DNA, 23 bp, Artificial Sequence
  HLA-A targeting gRNA
ggaaccccgcttcatcgccgtgg

SEQ ID NO: 2925 - DNA, 23 bp, Artificial Sequence
  HLA-A targeting gRNA
ggaagcaccacccacaatcatgg

SEQ ID NO: 2926 - DNA, 23 bp, Artificial Sequence
  HLA-A targeting gRNA
ggaaggagacgctgcagcgaagg

SEQ ID NO: 2927 - DNA, 23 bp, Artificial Sequence
  HLA-A targeting gRNA
tggcccgtccgtgggggatgagg

SEQ ID NO: 2928 - DNA, 23 bp, Artificial Sequence
  HLA-A targeting gRNA
ggaccaggagactgaccgagtgg

SEQ ID NO: 2929 - DNA, 23 bp, Artificial Sequence
  HLA-A targeting gRNA
ggaccctcagagtcactctctgg

SEQ ID NO: 2930 - DNA, 23 bp, Artificial Sequence
  HLA-A targeting gRNA
cggggcggggctcgggggactgg

SEQ ID NO: 2931 - DNA, 23 bp, Artificial Sequence
  HLA-A targeting gRNA
ggacctgcgctcttagaccgcgg

SEQ ID NO: 2932 - DNA, 23 bp, Artificial Sequence
  HLA-A targeting gRNA
ggggcggggctcgggggactggg

SEQ ID NO: 2933 - DNA, 23 bp, Artificial Sequence
  HLA-A targeting gRNA
ggactccgagacccttgccccgg

SEQ ID NO: 2934 - DNA, 23 bp, Artificial Sequence
  HLA-A targeting gRNA
ggactccgagacccttgtcccgg

SEQ ID NO: 2935 - DNA, 23 bp, Artificial Sequence
  HLA-A targeting gRNA
ggagaaatacctcatggattggg

SEQ ID NO: 2936 - DNA, 23 bp, Artificial Sequence
  HLA-A targeting gRNA
tcacgacccctcatcccccacgg

SEQ ID NO: 2937 - DNA, 23 bp, Artificial Sequence
  HLA-A targeting gRNA
ggagactgaccgagtggacctgg

SEQ ID NO: 2938 - DNA, 23 bp, Artificial Sequence
  HLA-A targeting gRNA
ggagagcctacctggagggccgg

SEQ ID NO: 2939 - DNA, 23 bp, Artificial Sequence
  HLA-A targeting gRNA
ggagagtctacctggagggccgg

SEQ ID NO: 2940 - DNA, 23 bp, Artificial Sequence
  HLA-A targeting gRNA
ggagatgtagaaatacctcatgg

SEQ ID NO: 2941 - DNA, 23 bp, Artificial Sequence
  HLA-A targeting gRNA
ggagcagcggagagtctacctgg

SEQ ID NO: 2942 - DNA, 23 bp, Artificial Sequence
  HLA-A targeting gRNA
ggagccccgcggcttcggggtgg

SEQ ID NO: 2943 - DNA, 23 bp, Artificial Sequence
  HLA-A targeting gRNA
ggagccccgcttcatcgctgtgg

SEQ ID NO: 2944 - DNA, 23 bp, Artificial Sequence
  HLA-A targeting gRNA
ggagccctgcttcatcgccgtgg

SEQ ID NO: 2945 - DNA, 23 bp, Artificial Sequence
  HLA-A targeting gRNA
ggagccggagtattgggacgagg

SEQ ID NO: 2946 - DNA, 23 bp, Artificial Sequence
  HLA-A targeting gRNA
ggagcctgggggcgaggagtggg

SEQ ID NO: 2947 - DNA, 23 bp, Artificial Sequence
  HLA-A targeting gRNA
ggaggactagacccaggacacgg

SEQ ID NO: 2948 - DNA, 23 bp, Artificial Sequence
  HLA-A targeting gRNA
ggagggcgatattatagtgttgg

SEQ ID NO: 2949 - DNA, 23 bp, Artificial Sequence
  HLA-A targeting gRNA
ggagtaggagcctgggggcgagg

SEQ ID NO: 2950 - DNA, 23 bp, Artificial Sequence
  HLA-A targeting gRNA
ggagtcccgcggcttcggggcgg

SEQ ID NO: 2951 - DNA, 23 bp, Artificial Sequence
  HLA-A targeting gRNA
ggagtcccgcggcttcggggtgg

SEQ ID NO: 2952 - DNA, 23 bp, Artificial Sequence
  HLA-A targeting gRNA
cacgcactcgccctccaggtagg

SEQ ID NO: 2953 - DNA, 23 bp, Artificial Sequence
  HLA-A targeting gRNA
ctacctggagggcgagtgcgtgg

SEQ ID NO: 2954 - DNA, 23 bp, Artificial Sequence
  HLA-A targeting gRNA
ggatagggaggaccagacccagg

SEQ ID NO: 2955 - DNA, 23 bp, Artificial Sequence
  HLA-A targeting gRNA
ggatgggaccttccagaagtggg

SEQ ID NO: 2956 - DNA, 23 bp, Artificial Sequence
  HLA-A targeting gRNA
ggatggggaggactagacccagg

SEQ ID NO: 2957 - DNA, 23 bp, Artificial Sequence
  HLA-A targeting gRNA
ggatgtatggttgcgacgtgggg

SEQ ID NO: 2958 - DNA, 23 bp, Artificial Sequence
  HLA-A targeting gRNA
ggatgtattgagcatgcaatggg

SEQ ID NO: 2959 - DNA, 23 bp, Artificial Sequence
  HLA-A targeting gRNA
ggattgggagcctggggacgagg

SEQ ID NO: 2960 - DNA, 23 bp, Artificial Sequence
  HLA-A targeting gRNA
ggccaaaaatccccccgggtggg

SEQ ID NO: 2961 - DNA, 23 bp, Artificial Sequence
  HLA-A targeting gRNA
ggccagccccggagatctacagg

SEQ ID NO: 2962 - DNA, 23 bp, Artificial Sequence
  HLA-A targeting gRNA
ggcccgtccgtaggggatgaggg

SEQ ID NO: 2963 - DNA, 23 bp, Artificial Sequence
  HLA-A targeting gRNA
ggcccgtccgtggggaatgaggg

SEQ ID NO: 2964 - DNA, 23 bp, Artificial Sequence
  HLA-A targeting gRNA
ggccctgacccagaccagggcgg

SEQ ID NO: 2965 - DNA, 23 bp, Artificial Sequence
  HLA-A targeting gRNA
ggccctgagcttctaccctgtgg

SEQ ID NO: 2966 - DNA, 23 bp, Artificial Sequence
  HLA-A targeting gRNA
ggccgcctcccacttgcgctcgg

SEQ ID NO: 2967 - DNA, 23 bp, Artificial Sequence
  HLA-A targeting gRNA
ggcgacctggcccgtccgtaggg

SEQ ID NO: 2968 - DNA, 23 bp, Artificial Sequence
  HLA-A targeting gRNA
ggcgccatgatggccatcctcgg

SEQ ID NO: 2969 - DNA, 23 bp, Artificial Sequence
  HLA-A targeting gRNA
ggcggcatgacggccatcctcgg

SEQ ID NO: 2970 - DNA, 23 bp, Artificial Sequence
  HLA-A targeting gRNA
ggctccgagacccttgtcccggg

SEQ ID NO: 2971 - DNA, 23 bp, Artificial Sequence
  HLA-A targeting gRNA
ggctcctcctgctctatccacgg

SEQ ID NO: 2972 - DNA, 23 bp, Artificial Sequence
  HLA-A targeting gRNA
ggctgccacgtggggtcggacgg

SEQ ID NO: 2973 - DNA, 23 bp, Artificial Sequence
  HLA-A targeting gRNA
ggctggcctcccacaagaaaggg

SEQ ID NO: 2974 - DNA, 23 bp, Artificial Sequence
  HLA-A targeting gRNA
ggctgggctgaccgcggggtcgg

SEQ ID NO: 2975 - DNA, 23 bp, Artificial Sequence
  HLA-A targeting gRNA
gggagactccgcccatgaggcgg

SEQ ID NO: 2976 - DNA, 23 bp, Artificial Sequence
  HLA-A targeting gRNA
gggagctgggcggggctcggggg

SEQ ID NO: 2977 - DNA, 23 bp, Artificial Sequence
  HLA-A targeting gRNA
gggaggcgccccgtggtccctgg

SEQ ID NO: 2978 - DNA, 23 bp, Artificial Sequence
  HLA-A targeting gRNA
gggaggcgccctgtggcccctgg

SEQ ID NO: 2979 - DNA, 23 bp, Artificial Sequence
  HLA-A targeting gRNA
gggatgggaccttccagaagtgg

SEQ ID NO: 2980 - DNA, 23 bp, Artificial Sequence
  HLA-A targeting gRNA
gggcctgagaggaaaagtcacgg

SEQ ID NO: 2981 - DNA, 23 bp, Artificial Sequence
  HLA-A targeting gRNA
gggcgacctggcccgtccgtagg

SEQ ID NO: 2982 - DNA, 23 bp, Artificial Sequence
  HLA-A targeting gRNA
gggcggggctcgggggagctggg

SEQ ID NO: 2983 - DNA, 23 bp, Artificial Sequence
  HLA-A targeting gRNA
gggctccgagacccttgtcccgg

SEQ ID NO: 2984 - DNA, 23 bp, Artificial Sequence
  HLA-A targeting gRNA
gggctcgggggagctgggcgggg

SEQ ID NO: 2985 - DNA, 23 bp, Artificial Sequence
  HLA-A targeting gRNA
gggctggcctcccacaagaaagg

SEQ ID NO: 2986 - DNA, 23 bp, Artificial Sequence
  HLA-A targeting gRNA
ggggagctgggcggggctcgggg

SEQ ID NO: 2987 - DNA, 23 bp, Artificial Sequence
  HLA-A targeting gRNA
ggggccggagtattgggacgggg

SEQ ID NO: 2988 - DNA, 23 bp, Artificial Sequence
  HLA-A targeting gRNA
acccctcatcccccacggacggg

SEQ ID NO: 2989 - DNA, 23 bp, Artificial Sequence
  HLA-A targeting gRNA
ggggctcgggggagctgggcggg

SEQ ID NO: 2990 - DNA, 23 bp, Artificial Sequence
  HLA-A targeting gRNA
gacccctcatcccccacggacgg

SEQ ID NO: 2991 - DNA, 23 bp, Artificial Sequence
  HLA-A targeting gRNA
gcccgtccgtgggggatgagggg

SEQ ID NO: 2992 - DNA, 23 bp, Artificial Sequence
  HLA-A targeting gRNA
ggcccgtccgtgggggatgaggg

SEQ ID NO: 2993 - DNA, 23 bp, Artificial Sequence
  HLA-A targeting gRNA
gggggagctgggcggggctcggg

SEQ ID NO: 2994 - DNA, 23 bp, Artificial Sequence
  HLA-A targeting gRNA
ccagggcccccgagagtagcagg

SEQ ID NO: 2995 - DNA, 23 bp, Artificial Sequence
  HLA-A targeting gRNA
cctgctactctcgggggccctgg

SEQ ID NO: 2996 - DNA, 23 bp, Artificial Sequence
  HLA-A targeting gRNA
ggggtcctgacctgcgccaccgg

SEQ ID NO: 2997 - DNA, 23 bp, Artificial Sequence
  HLA-A targeting gRNA
ggggttccccgcggccgggccgg

SEQ ID NO: 2998 - DNA, 23 bp, Artificial Sequence
  HLA-A targeting gRNA
gggtgggtcggggcggggcgggg

SEQ ID NO: 2999 - DNA, 23 bp, Artificial Sequence
  HLA-A targeting gRNA
gggttccccgcggccgggccggg

SEQ ID NO: 3000 - DNA, 23 bp, Artificial Sequence
  HLA-A targeting gRNA
ggtacagaatctggaaacccagg

SEQ ID NO: 3001 - DNA, 23 bp, Artificial Sequence
  HLA-A targeting gRNA
ggtcatatgtgtcttgggggggg

SEQ ID NO: 3002 - DNA, 23 bp, Artificial Sequence
  HLA-A targeting gRNA
ggtccactcggtcagtctcctgg

SEQ ID NO: 3003 - DNA, 23 bp, Artificial Sequence
  HLA-A targeting gRNA
ggtccatgcggcgggagcagcgg

SEQ ID NO: 3004 - DNA, 23 bp, Artificial Sequence
  HLA-A targeting gRNA
ggtcccatcccctgcaggcctgg

SEQ ID NO: 3005 - DNA, 23 bp, Artificial Sequence
  HLA-A targeting gRNA
ggtccctgacgacagacctcagg

SEQ ID NO: 3006 - DNA, 23 bp, Artificial Sequence
  HLA-A targeting gRNA
ggtccttgggatattgtggttgg

SEQ ID NO: 3007 - DNA, 23 bp, Artificial Sequence
  HLA-A targeting gRNA
gagccccgcttcatcgccgtggg

SEQ ID NO: 3008 - DNA, 23 bp, Artificial Sequence
  HLA-A targeting gRNA
ggagccccgcttcatcgccgtgg

SEQ ID NO: 3009 - DNA, 23 bp, Artificial Sequence
  HLA-A targeting gRNA
ggtctgcattcacacatttctgg

SEQ ID NO: 3010 - DNA, 23 bp, Artificial Sequence
  HLA-A targeting gRNA
cgtagcccacggcgatgaagcgg

SEQ ID NO: 3011 - DNA, 23 bp, Artificial Sequence
  HLA-A targeting gRNA
ggtgagtcatatgcgtcctgggg

SEQ ID NO: 3012 - DNA, 23 bp, Artificial Sequence
  HLA-A targeting gRNA
gtagcccacggcgatgaagcggg

SEQ ID NO: 3013 - DNA, 23 bp, Artificial Sequence
  HLA-A targeting gRNA
ggtgagtcatatgtgtcttgggg

SEQ ID NO: 3014 - DNA, 23 bp, Artificial Sequence
  HLA-A targeting gRNA
ggtggacatgggggtggggtggg

SEQ ID NO: 3015 - DNA, 23 bp, Artificial Sequence
  HLA-A targeting gRNA
tagcccacggcgatgaagcgggg

SEQ ID NO: 3016 - DNA, 23 bp, Artificial Sequence
  HLA-A targeting gRNA
cttcatcgccgtgggctacgtgg

SEQ ID NO: 3017 - DNA, 23 bp, Artificial Sequence
  HLA-A targeting gRNA
ggtgggcccatgattgtgggtgg

SEQ ID NO: 3018 - DNA, 23 bp, Artificial Sequence
  HLA-A targeting gRNA
ggtggtcatatgtgtcttggggg

SEQ ID NO: 3019 - DNA, 23 bp, Artificial Sequence
  HLA-A targeting gRNA
ggtggtggtcatatgtgtcttgg

SEQ ID NO: 3020 - DNA, 23 bp, Artificial Sequence
  HLA-A targeting gRNA
ggttccatcccctgcaggcttgg

SEQ ID NO: 3021 - DNA, 23 bp, Artificial Sequence
  HLA-A targeting gRNA
ggttgcgacgtggggccggacgg

SEQ ID NO: 3022 - DNA, 23 bp, Artificial Sequence
  HLA-A targeting gRNA
gtagaaatacctcatggagtagg

SEQ ID NO: 3023 - DNA, 23 bp, Artificial Sequence
  HLA-A targeting gRNA
gtagcccacagcgatgaagcggg

SEQ ID NO: 3024 - DNA, 23 bp, Artificial Sequence
  HLA-A targeting gRNA
gtagcccacggcgatgaagcagg

SEQ ID NO: 3025 - DNA, 23 bp, Artificial Sequence
  HLA-A targeting gRNA
gtatggctgccacgtggggtcgg

SEQ ID NO: 3026 - DNA, 23 bp, Artificial Sequence
  HLA-A targeting gRNA
gtatggttgcgacgtggggccgg

SEQ ID NO: 3027 - DNA, 23 bp, Artificial Sequence
  HLA-A targeting gRNA
gtcagatcccacagaacatgtgg

SEQ ID NO: 3028 - DNA, 23 bp, Artificial Sequence
  HLA-A targeting gRNA
gtcccatgacagatgcaaaatgg

SEQ ID NO: 3029 - DNA, 23 bp, Artificial Sequence
  HLA-A targeting gRNA
gtcctccccatcccgctgtcagg

SEQ ID NO: 3030 - DNA, 23 bp, Artificial Sequence
  HLA-A targeting gRNA
gtcctccctatcccgctgccagg

SEQ ID NO: 3031 - DNA, 23 bp, Artificial Sequence
  HLA-A targeting gRNA
gtccttgggatattgtggttggg

SEQ ID NO: 3032 - DNA, 23 bp, Artificial Sequence
  HLA-A targeting gRNA
gtctcggagccccgcggcttcgg

SEQ ID NO: 3033 - DNA, 23 bp, Artificial Sequence
  HLA-A targeting gRNA
gtctcggagtcccgcggcttcgg

SEQ ID NO: 3034 - DNA, 23 bp, Artificial Sequence
  HLA-A targeting gRNA
ccaggtctgggtcagggccaggg

SEQ ID NO: 3035 - DNA, 23 bp, Artificial Sequence
  HLA-A targeting gRNA
cccaggtctgggtcagggccagg

SEQ ID NO: 3036 - DNA, 23 bp, Artificial Sequence
  HLA-A targeting gRNA
ccctggccctgacccagacctgg

SEQ ID NO: 3037 - DNA, 23 bp, Artificial Sequence
  HLA-A targeting gRNA
cctggccctgacccagacctggg

SEQ ID NO: 3038 - DNA, 23 bp, Artificial Sequence
  HLA-A targeting gRNA
gtgaccccggccggtggcgcagg

SEQ ID NO: 3039 - DNA, 23 bp, Artificial Sequence
  HLA-A targeting gRNA
gtgacctgcgcccccggccgggg

SEQ ID NO: 3040 - DNA, 23 bp, Artificial Sequence
  HLA-A targeting gRNA
gtgagtcatatgcgtcctggggg

SEQ ID NO: 3041 - DNA, 23 bp, Artificial Sequence
  HLA-A targeting gRNA
gtgagtcatatgtgtcttggggg

SEQ ID NO: 3042 - DNA, 23 bp, Artificial Sequence
  HLA-A targeting gRNA
gtgcttcccaggaatgagacagg

SEQ ID NO: 3043 - DNA, 23 bp, Artificial Sequence
  HLA-A targeting gRNA
gtcactcaccgtcctcgctctgg

SEQ ID NO: 3044 - DNA, 23 bp, Artificial Sequence
  HLA-A targeting gRNA
acggtgagtgaccccggcccggg

SEQ ID NO: 3045 - DNA, 23 bp, Artificial Sequence
  HLA-A targeting gRNA
gacggtgagtgaccccggcccgg

SEQ ID NO: 3046 - DNA, 23 bp, Artificial Sequence
  HLA-A targeting gRNA
gtggacctggggaccctgcacgg

SEQ ID NO: 3047 - DNA, 23 bp, Artificial Sequence
  HLA-A targeting gRNA
tactacaaccagagcgaggacgg

SEQ ID NO: 3048 - DNA, 23 bp, Artificial Sequence
  HLA-A targeting gRNA
gtggatagagcaggaggagccgg

SEQ ID NO: 3049 - DNA, 23 bp, Artificial Sequence
  HLA-A targeting gRNA
gcgaggacggtgagtgaccccgg

SEQ ID NO: 3050 - DNA, 23 bp, Artificial Sequence
  HLA-A targeting gRNA
gtgttccggtcccaatactccgg

SEQ ID NO: 3051 - DNA, 23 bp, Artificial Sequence
  HLA-A targeting gRNA
gtgggaggcggcccatgaggcgg

SEQ ID NO: 3052 - DNA, 23 bp, Artificial Sequence
  HLA-A targeting gRNA
gtgggaggcggcccgtgtggagg

SEQ ID NO: 3053 - DNA, 23 bp, Artificial Sequence
  HLA-A targeting gRNA
gtgggctgggaagatggctctgg

SEQ ID NO: 3054 - DNA, 23 bp, Artificial Sequence
  HLA-A targeting gRNA
gtgggaggcggcccgttgggcgg

SEQ ID NO: 3055 - DNA, 23 bp, Artificial Sequence
  HLA-A targeting gRNA
gtgggaggcggtccatgcggcgg

SEQ ID NO: 3056 - DNA, 23 bp, Artificial Sequence
  HLA-A targeting gRNA
tgggctgggaagatggctctggg

SEQ ID NO: 3057 - DNA, 23 bp, Artificial Sequence
  HLA-A targeting gRNA
gtggtcatatgtgtcttgggggg

SEQ ID NO: 3058 - DNA, 23 bp, Artificial Sequence
  HLA-A targeting gRNA
gtggtgagtcatatgcgtcctgg

SEQ ID NO: 3059 - DNA, 23 bp, Artificial Sequence
  HLA-A targeting gRNA
gtggtgagtcatatgtgtcttgg

SEQ ID NO: 3060 - DNA, 23 bp, Artificial Sequence
  HLA-A targeting gRNA
gtggtggtcatatgtgtcttggg

SEQ ID NO: 3061 - DNA, 23 bp, Artificial Sequence
  HLA-A targeting gRNA
gtgtcttgggggcgtctgtcagg

SEQ ID NO: 3062 - DNA, 23 bp, Artificial Sequence
  HLA-A targeting gRNA
gtgtcttggggggggtctgacgg

SEQ ID NO: 3063 - DNA, 23 bp, Artificial Sequence
  HLA-A targeting gRNA
gttgcgacgtggggccggacggg

SEQ ID NO: 3064 - DNA, 23 bp, Artificial Sequence
  HLA-A targeting gRNA
gttggggaatctccaaggctggg

SEQ ID NO: 3065 - DNA, 23 bp, Artificial Sequence
  HLA-A targeting gRNA
gttggtgtaggcataatgtgagg

SEQ ID NO: 3066 - DNA, 23 bp, Artificial Sequence
  HLA-A targeting gRNA
gtttaggccaaaaatccccctgg

SEQ ID NO: 3067 - DNA, 23 bp, Artificial Sequence
  HLA-A targeting gRNA
gtttccagagagtgactctgagg

SEQ ID NO: 3068 - DNA, 23 bp, Artificial Sequence
  HLA-A targeting gRNA
taaagcacctgttacaatgaagg

SEQ ID NO: 3069 - DNA, 23 bp, Artificial Sequence
  HLA-A targeting gRNA
taaggagacgctgcagcgcacgg

SEQ ID NO: 3070 - DNA, 23 bp, Artificial Sequence
  HLA-A targeting gRNA
taagggataaaaatctctgaagg

SEQ ID NO: 3071 - DNA, 23 bp, Artificial Sequence
  HLA-A targeting gRNA
taatcttctattccctgacgagg

SEQ ID NO: 3072 - DNA, 23 bp, Artificial Sequence
  HLA-A targeting gRNA
taatcttctattccctgcagagg

SEQ ID NO: 3073 - DNA, 23 bp, Artificial Sequence
  HLA-A targeting gRNA
tacatctccgtgtcccggcccgg

SEQ ID NO: 3074 - DNA, 23 bp, Artificial Sequence
  HLA-A targeting gRNA
taccagcaggacgcttacgacgg

SEQ ID NO: 3075 - DNA, 23 bp, Artificial Sequence
  HLA-A targeting gRNA
taccggcagcacgcctacgacgg

SEQ ID NO: 3076 - DNA, 23 bp, Artificial Sequence
  HLA-A targeting gRNA
taccggcaggacgcctaagacgg

SEQ ID NO: 3077 - DNA, 23 bp, Artificial Sequence
  HLA-A targeting gRNA
taccggcaggacgcctacgaagg

SEQ ID NO: 3078 - DNA, 23 bp, Artificial Sequence
  HLA-A targeting gRNA
taccggcaggtcgcctacgacgg

SEQ ID NO: 3079 - DNA, 23 bp, Artificial Sequence
  HLA-A targeting gRNA
taccgttctccaggtatctgcgg

SEQ ID NO: 3080 - DNA, 23 bp, Artificial Sequence
  HLA-A targeting gRNA
tacctcatggagtaggagcctgg

SEQ ID NO: 3081 - DNA, 23 bp, Artificial Sequence
  HLA-A targeting gRNA
tacctcatggattgggagcctgg

SEQ ID NO: 3082 - DNA, 23 bp, Artificial Sequence
  HLA-A targeting gRNA
tactacaacgagagcgaggccgg

SEQ ID NO: 3083 - DNA, 23 bp, Artificial Sequence
  HLA-A targeting gRNA
tagcccacagcgatgaagcgggg

SEQ ID NO: 3084 - DNA, 23 bp, Artificial Sequence
  HLA-A targeting gRNA
tagcccacggcgatgaagcaggg

SEQ ID NO: 3085 - DNA, 23 bp, Artificial Sequence
  HLA-A targeting gRNA
taggcataatgtgaggagatagg

SEQ ID NO: 3086 - DNA, 23 bp, Artificial Sequence
  HLA-A targeting gRNA
tatctcttctcctttccagaagg

SEQ ID NO: 3087 - DNA, 23 bp, Artificial Sequence
  HLA-A targeting gRNA
tattgtggttgggagcccatggg

SEQ ID NO: 3088 - DNA, 23 bp, Artificial Sequence
  HLA-A targeting gRNA
tcaccctccctctgctcctgagg

SEQ ID NO: 3089 - DNA, 23 bp, Artificial Sequence
  HLA-A targeting gRNA
tcacgacccctcatcccctacgg

SEQ ID NO: 3090 - DNA, 23 bp, Artificial Sequence
  HLA-A targeting gRNA
tcacgacccctcattccccacgg

SEQ ID NO: 3091 - DNA, 23 bp, Artificial Sequence
  HLA-A targeting gRNA
gggatggtgggctgggaagatgg

SEQ ID NO: 3092 - DNA, 23 bp, Artificial Sequence
  HLA-A targeting gRNA
tcactctctggaaacccaggagg

SEQ ID NO: 3093 - DNA, 23 bp, Artificial Sequence
  HLA-A targeting gRNA
tcactctctggtacagaatctgg

SEQ ID NO: 3094 - DNA, 23 bp, Artificial Sequence
  HLA-A targeting gRNA
tcagatcaccaagcacaagtggg

SEQ ID NO: 3095 - DNA, 23 bp, Artificial Sequence
  HLA-A targeting gRNA
tcagatcaccgagcgcaagtggg

SEQ ID NO: 3096 - DNA, 23 bp, Artificial Sequence
  HLA-A targeting gRNA
tcatcccctacggacgggccagg

SEQ ID NO: 3097 - DNA, 23 bp, Artificial Sequence
  HLA-A targeting gRNA
tcattccccacggacgggccggg

SEQ ID NO: 3098 - DNA, 23 bp, Artificial Sequence
  HLA-A targeting gRNA
tccccccgggtgggtcggggcgg

SEQ ID NO: 3099 - DNA, 23 bp, Artificial Sequence
  HLA-A targeting gRNA
gagcccctcaccctgagatgggg

SEQ ID NO: 3100 - DNA, 23 bp, Artificial Sequence
  HLA-A targeting gRNA
tccccctggttggtcggggccgg

SEQ ID NO: 3101 - DNA, 23 bp, Artificial Sequence
  HLA-A targeting gRNA
tcccgttcttcaggtatctgcgg

SEQ ID NO: 3102 - DNA, 23 bp, Artificial Sequence
  HLA-A targeting gRNA
tccctccttaacccatctcaggg

SEQ ID NO: 3103 - DNA, 23 bp, Artificial Sequence
  HLA-A targeting gRNA
tccctccttatcccatctcaggg

SEQ ID NO: 3104 - DNA, 23 bp, Artificial Sequence
  HLA-A targeting gRNA
tccctctgctcctgagggagagg

SEQ ID NO: 3105 - DNA, 23 bp, Artificial Sequence
  HLA-A targeting gRNA
tccgcagatacctgaagaacggg

SEQ ID NO: 3106 - DNA, 23 bp, Artificial Sequence
  HLA-A targeting gRNA
tcctctagccacatgttctgtgg

SEQ ID NO: 3107 - DNA, 23 bp, Artificial Sequence
  HLA-A targeting gRNA
tcctctccctcaggagcagaggg

SEQ ID NO: 3108 - DNA, 23 bp, Artificial Sequence
  HLA-A targeting gRNA
tcctgacctgcgccaccggccgg

SEQ ID NO: 3109 - DNA, 23 bp, Artificial Sequence
  HLA-A targeting gRNA
tcgccctccctctggtcttgagg

SEQ ID NO: 3110 - DNA, 23 bp, Artificial Sequence
  HLA-A targeting gRNA
tcgctcggtcagtctgtgagtgg

SEQ ID NO: 3111 - DNA, 23 bp, Artificial Sequence
  HLA-A targeting gRNA
tcgctcggttagtctgtgagtgg

SEQ ID NO: 3112 - DNA, 23 bp, Artificial Sequence
  HLA-A targeting gRNA
tcgggccactcctcgcccccagg

SEQ ID NO: 3113 - DNA, 23 bp, Artificial Sequence
  HLA-A targeting gRNA
tcgggggctgggctgaccgcggg

SEQ ID NO: 3114 - DNA, 23 bp, Artificial Sequence
  HLA-A targeting gRNA
tcgtgacctgcgcccccggccgg

SEQ ID NO: 3115 - DNA, 23 bp, Artificial Sequence
  HLA-A targeting gRNA
tcgtggaggccaggcctgcaggg

SEQ ID NO: 3116 - DNA, 23 bp, Artificial Sequence
  HLA-A targeting gRNA
tcgtgtcccggcccggccgcggg

SEQ ID NO: 3117 - DNA, 23 bp, Artificial Sequence
  HLA-A targeting gRNA
tctcaactgctccgcccaacggg

SEQ ID NO: 3118 - DNA, 23 bp, Artificial Sequence
  HLA-A targeting gRNA
tctcaactgctcctccacacggg

SEQ ID NO: 3119 - DNA, 23 bp, Artificial Sequence
  HLA-A targeting gRNA
tctcaactgctctgccacacggg

SEQ ID NO: 3120 - DNA, 23 bp, Artificial Sequence
  HLA-A targeting gRNA
tctcactccaattgggtgtcggg

SEQ ID NO: 3121 - DNA, 23 bp, Artificial Sequence
  HLA-A targeting gRNA
tctcactcctattgggtgtcggg

SEQ ID NO: 3122 - DNA, 23 bp, Artificial Sequence
  HLA-A targeting gRNA
tctcagccactgctcgccccagg

SEQ ID NO: 3123 - DNA, 23 bp, Artificial Sequence
  HLA-A targeting gRNA
tctcagctgctccgccacatggg

SEQ ID NO: 3124 - DNA, 23 bp, Artificial Sequence
  HLA-A targeting gRNA
tctcagctgctccgcccgacggg

SEQ ID NO: 3125 - DNA, 23 bp, Artificial Sequence
  HLA-A targeting gRNA
tctccacagggtagaagctcagg

SEQ ID NO: 3126 - DNA, 23 bp, Artificial Sequence
  HLA-A targeting gRNA
tctccctcaagaccagagggagg

SEQ ID NO: 3127 - DNA, 23 bp, Artificial Sequence
  HLA-A targeting gRNA
tctccctcaggagcagagggagg

SEQ ID NO: 3128 - DNA, 23 bp, Artificial Sequence
  HLA-A targeting gRNA
tctccgctgctcccgccgcatgg

SEQ ID NO: 3129 - DNA, 23 bp, Artificial Sequence
  HLA-A targeting gRNA
tctccgctgctccgcccgacggg

SEQ ID NO: 3130 - DNA, 23 bp, Artificial Sequence
  HLA-A targeting gRNA
tctcggagccccgcggcttcggg

SEQ ID NO: 3131 - DNA, 23 bp, Artificial Sequence
  HLA-A targeting gRNA
tctcggagtcccgcggcttcggg

SEQ ID NO: 3132 - DNA, 23 bp, Artificial Sequence
  HLA-A targeting gRNA
tctcgttgtagtagccgcgcagg

SEQ ID NO: 3133 - DNA, 23 bp, Artificial Sequence
  HLA-A targeting gRNA
tctctcggtcagtctgtgactgg

SEQ ID NO: 3134 - DNA, 23 bp, Artificial Sequence
  HLA-A targeting gRNA
tctctcggtcagtctgtgatggg

SEQ ID NO: 3135 - DNA, 23 bp, Artificial Sequence
  HLA-A targeting gRNA
tctctgcagggtagaagcccagg

SEQ ID NO: 3136 - DNA, 23 bp, Artificial Sequence
  HLA-A targeting gRNA
tctctgctgctccgccacacggg

SEQ ID NO: 3137 - DNA, 23 bp, Artificial Sequence
  HLA-A targeting gRNA
tctctgctgctccgcctcatggg

SEQ ID NO: 3138 - DNA, 23 bp, Artificial Sequence
  HLA-A targeting gRNA
tctggttgtagtagccgtgcagg

SEQ ID NO: 3139 - DNA, 23 bp, Artificial Sequence
  HLA-A targeting gRNA
tcttcctgacagacccccccagg

SEQ ID NO: 3140 - DNA, 23 bp, Artificial Sequence
  HLA-A targeting gRNA
tcttctccctcaagaccagaggg

SEQ ID NO: 3141 - DNA, 23 bp, Artificial Sequence
  HLA-A targeting gRNA
tgaaaatgaaaccgggttaaagg

SEQ ID NO: 3142 - DNA, 23 bp, Artificial Sequence
  HLA-A targeting gRNA
tgaaaccggctaaaggcgcctgg

SEQ ID NO: 3143 - DNA, 23 bp, Artificial Sequence
  HLA-A targeting gRNA
tgagagcctacctggagggccgg

SEQ ID NO: 3144 - DNA, 23 bp, Artificial Sequence
  HLA-A targeting gRNA
ggggagccgcgccgggaggaggg

SEQ ID NO: 3145 - DNA, 23 bp, Artificial Sequence
  HLA-A targeting gRNA
cgtgtcgtccacgtagcccacgg

SEQ ID NO: 3146 - DNA, 23 bp, Artificial Sequence
  HLA-A targeting gRNA
catgtcccggcccggccgcgggg

SEQ ID NO: 3147 - DNA, 23 bp, Artificial Sequence
  HLA-A targeting gRNA
tgagctaccagaaaggagccagg

SEQ ID NO: 3148 - DNA, 23 bp, Artificial Sequence
  HLA-A targeting gRNA
tgaggatggacaggacacctggg

SEQ ID NO: 3149 - DNA, 23 bp, Artificial Sequence
  HLA-A targeting gRNA
ccatgtcccggcccggccgcggg

SEQ ID NO: 3150 - DNA, 23 bp, Artificial Sequence
  HLA-A targeting gRNA
cccgcggccgggccgggacatgg

SEQ ID NO: 3151 - DNA, 23 bp, Artificial Sequence
  HLA-A targeting gRNA
tgaggccactctgaggtgctggg

SEQ ID NO: 3152 - DNA, 23 bp, Artificial Sequence
  HLA-A targeting gRNA
aggagcgcaggtcctcgttcagg

SEQ ID NO: 3153 - DNA, 23 bp, Artificial Sequence
  HLA-A targeting gRNA
ggagcgcaggtcctcgttcaggg

SEQ ID NO: 3154 - DNA, 23 bp, Artificial Sequence
  HLA-A targeting gRNA
tgagggagaagaatcctcctggg

SEQ ID NO: 3155 - DNA, 23 bp, Artificial Sequence
  HLA-A targeting gRNA
tgagtcatatgcgtcctgggggg

SEQ ID NO: 3156 - DNA, 23 bp, Artificial Sequence
  HLA-A targeting gRNA
tgaacgaggacctgcgctcctgg

SEQ ID NO: 3157 - DNA, 23 bp, Artificial Sequence
  HLA-A targeting gRNA
tgagtgtgaagcagagaacaggg

SEQ ID NO: 3158 - DNA, 23 bp, Artificial Sequence
  HLA-A targeting gRNA
tgagtgtgaagcagagaacgagg

SEQ ID NO: 3159 - DNA, 23 bp, Artificial Sequence
  HLA-A targeting gRNA
tgatcgcctgtagatctccgggg

SEQ ID NO: 3160 - DNA, 23 bp, Artificial Sequence
  HLA-A targeting gRNA
tgatggccatcctcggcgtctgg

SEQ ID NO: 3161 - DNA, 23 bp, Artificial Sequence
  HLA-A targeting gRNA
tgatgtatggctgccacgtgggg

SEQ ID NO: 3162 - DNA, 23 bp, Artificial Sequence
  HLA-A targeting gRNA
tgatgtgtgttgggtgttggggg

SEQ ID NO: 3163 - DNA, 23 bp, Artificial Sequence
  HLA-A targeting gRNA
tgccatgtccgccgcggtccagg

SEQ ID NO: 3164 - DNA, 23 bp, Artificial Sequence
  HLA-A targeting gRNA
tgcccggccccgaccaaccaggg

SEQ ID NO: 3165 - DNA, 23 bp, Artificial Sequence
  HLA-A targeting gRNA
tgccgccggtgtgtgtcaaaggg

SEQ ID NO: 3166 - DNA, 23 bp, Artificial Sequence
  HLA-A targeting gRNA
tgccgtcgtaagcgtcctgctgg

SEQ ID NO: 3167 - DNA, 23 bp, Artificial Sequence
  HLA-A targeting gRNA
tgccgtcgtaggcgacctgccgg

SEQ ID NO: 3168 - DNA, 23 bp, Artificial Sequence
  HLA-A targeting gRNA
tgccgtcgtaggcgtgctgccgg

SEQ ID NO: 3169 - DNA, 23 bp, Artificial Sequence
  HLA-A targeting gRNA
tgccgtcttaggcgtcctgccgg

SEQ ID NO: 3170 - DNA, 23 bp, Artificial Sequence
  HLA-A targeting gRNA
tgcctgtgtccaggctggtctgg

SEQ ID NO: 3171 - DNA, 23 bp, Artificial Sequence
  HLA-A targeting gRNA
tgccttcgtaggcgtcctgccgg

SEQ ID NO: 3172 - DNA, 23 bp, Artificial Sequence
  HLA-A targeting gRNA
tgcggagcccgtccacgcaccgg

SEQ ID NO: 3173 - DNA, 23 bp, Artificial Sequence
  HLA-A targeting gRNA
ggtggcctcatggtcagagatgg

SEQ ID NO: 3174 - DNA, 23 bp, Artificial Sequence
  HLA-A targeting gRNA
tgctgcagcgcacgggtaccagg

SEQ ID NO: 3175 - DNA, 23 bp, Artificial Sequence
  HLA-A targeting gRNA
tgcttcacactcaatatgtgtgg

SEQ ID NO: 3176 - DNA, 23 bp, Artificial Sequence
  HLA-A targeting gRNA
tgcttcccaggaatgagacaggg

SEQ ID NO: 3177 - DNA, 23 bp, Artificial Sequence
  HLA-A targeting gRNA
cagctgagagcctacctggaggg

SEQ ID NO: 3178 - DNA, 23 bp, Artificial Sequence
  HLA-A targeting gRNA
gcagctgagagcctacctggagg

SEQ ID NO: 3179 - DNA, 23 bp, Artificial Sequence
  HLA-A targeting gRNA
ggagcagctgagagcctacctgg

SEQ ID NO: 3180 - DNA, 23 bp, Artificial Sequence
  HLA-A targeting gRNA
tgcagacccagggcaggatcagg

SEQ ID NO: 3181 - DNA, 23 bp, Artificial Sequence
  HLA-A targeting gRNA
tggaaggtcccatcccctgcagg

SEQ ID NO: 3182 - DNA, 23 bp, Artificial Sequence
  HLA-A targeting gRNA
tggcctcatggtcagagatgggg

SEQ ID NO: 3183 - DNA, 23 bp, Artificial Sequence
  HLA-A targeting gRNA
gtggcctcatggtcagagatggg

SEQ ID NO: 3184 - DNA, 23 bp, Artificial Sequence
  HLA-A targeting gRNA
tggacgacacgcagttagtgcgg

SEQ ID NO: 3185 - DNA, 23 bp, Artificial Sequence
  HLA-A targeting gRNA
tggacggtgggctgggaagatgg

SEQ ID NO: 3186 - DNA, 23 bp, Artificial Sequence
  HLA-A targeting gRNA
atggtcagagatggggtggtggg

SEQ ID NO: 3187 - DNA, 23 bp, Artificial Sequence
  HLA-A targeting gRNA
tggagaaatacctcatggattgg

SEQ ID NO: 3188 - DNA, 23 bp, Artificial Sequence
  HLA-A targeting gRNA
catggtcagagatggggtggtgg

SEQ ID NO: 3189 - DNA, 23 bp, Artificial Sequence
  HLA-A targeting gRNA
ccaccccatctctgaccatgagg

SEQ ID NO: 3190 - DNA, 23 bp, Artificial Sequence
  HLA-A targeting gRNA
cctcatggtcagagatggggtgg

SEQ ID NO: 3191 - DNA, 23 bp, Artificial Sequence
  HLA-A targeting gRNA
tggagccgcgagccagaggatgg

SEQ ID NO: 3192 - DNA, 23 bp, Artificial Sequence
  HLA-A targeting gRNA
tggaggaagaagagctcaggtgg

SEQ ID NO: 3193 - DNA, 23 bp, Artificial Sequence
  HLA-A targeting gRNA
aggggtcgtgacctgcgccccgg

SEQ ID NO: 3194 - DNA, 23 bp, Artificial Sequence
  HLA-A targeting gRNA
ggggtcgtgacctgcgccccggg

SEQ ID NO: 3195 - DNA, 23 bp, Artificial Sequence
  HLA-A targeting gRNA
tggagggccggtgcgtggacggg

SEQ ID NO: 3196 - DNA, 23 bp, Artificial Sequence
  HLA-A targeting gRNA
tggagggcgagtgcgtggacggg

SEQ ID NO: 3197 - DNA, 23 bp, Artificial Sequence
  HLA-A targeting gRNA
tggagggcgagttcgtggagtgg

SEQ ID NO: 3198 - DNA, 23 bp, Artificial Sequence
  HLA-A targeting gRNA
tggatgtattgagcatgcaatgg

SEQ ID NO: 3199 - DNA, 23 bp, Artificial Sequence
  HLA-A targeting gRNA
tggccattttgaggatggacagg

SEQ ID NO: 3200 - DNA, 23 bp, Artificial Sequence
  HLA-A targeting gRNA
tggcccgtccgtaggggatgagg

SEQ ID NO: 3201 - DNA, 23 bp, Artificial Sequence
  HLA-A targeting gRNA
tggctcgcggctccatcctctgg

SEQ ID NO: 3202 - DNA, 23 bp, Artificial Sequence
  HLA-A targeting gRNA
tgggagcctggggcgagcagtgg

SEQ ID NO: 3203 - DNA, 23 bp, Artificial Sequence
  HLA-A targeting gRNA
tgggaggcggtccatgcggcggg

SEQ ID NO: 3204 - DNA, 23 bp, Artificial Sequence
  HLA-A targeting gRNA
tgggataaggagggagatggggg

SEQ ID NO: 3205 - DNA, 23 bp, Artificial Sequence
  HLA-A targeting gRNA
gtagaaatacctcatggagtggg

SEQ ID NO: 3206 - DNA, 23 bp, Artificial Sequence
  HLA-A targeting gRNA
tgtagaaatacctcatggagtgg

SEQ ID NO: 3207 - DNA, 23 bp, Artificial Sequence
  HLA-A targeting gRNA
tgggcggggctcgggggagctgg

SEQ ID NO: 3208 - DNA, 23 bp, Artificial Sequence
  HLA-A targeting gRNA
aaggagacgctgcagcgcgcggg

SEQ ID NO: 3209 - DNA, 23 bp, Artificial Sequence
  HLA-A targeting gRNA
gaaggagacgctgcagcgcgcgg

SEQ ID NO: 3210 - DNA, 23 bp, Artificial Sequence
  HLA-A targeting gRNA
cgggttggtcggggcggggcggg

SEQ ID NO: 3211 - DNA, 23 bp, Artificial Sequence
  HLA-A targeting gRNA
gggttggtcggggcggggcgggg

SEQ ID NO: 3212 - DNA, 23 bp, Artificial Sequence
  HLA-A targeting gRNA
tgggttaaggagggagatggggg

SEQ ID NO: 3213 - DNA, 23 bp, Artificial Sequence
  HLA-A targeting gRNA
cgctgcagcgcgcgggtaccagg

SEQ ID NO: 3214 - DNA, 23 bp, Artificial Sequence
  HLA-A targeting gRNA
tggtcatatgtgtcttggggggg

SEQ ID NO: 3215 - DNA, 23 bp, Artificial Sequence
  HLA-A targeting gRNA
gctgcagcgcgcgggtaccaggg

SEQ ID NO: 3216 - DNA, 23 bp, Artificial Sequence
  HLA-A targeting gRNA
ctgcagcgcgcgggtaccagggg

SEQ ID NO: 3217 - DNA, 23 bp, Artificial Sequence
  HLA-A targeting gRNA
tggtgagtcatatgcgtcctggg

SEQ ID NO: 3218 - DNA, 23 bp, Artificial Sequence
  HLA-A targeting gRNA
tggtgagtcatatgtgtcttggg

SEQ ID NO: 3219 - DNA, 23 bp, Artificial Sequence
  HLA-A targeting gRNA
tggtggtcatatgtgtcttgggg

SEQ ID NO: 3220 - DNA, 23 bp, Artificial Sequence
  HLA-A targeting gRNA
tggttggtcggggccgggcaggg

SEQ ID NO: 3221 - DNA, 23 bp, Artificial Sequence
  HLA-A targeting gRNA
tgtagcccacggcgatgaagcgg

SEQ ID NO: 3222 - DNA, 23 bp, Artificial Sequence
  HLA-A targeting gRNA
tgtcctgtccatcctcaaaatgg

SEQ ID NO: 3223 - DNA, 23 bp, Artificial Sequence
  HLA-A targeting gRNA
tgtcctgtgagctaccagaaagg

SEQ ID NO: 3224 - DNA, 23 bp, Artificial Sequence
  HLA-A targeting gRNA
tgtcttggggggggtctgacggg

SEQ ID NO: 3225 - DNA, 23 bp, Artificial Sequence
  HLA-A targeting gRNA
tgtgaatgcagacccagggcagg

SEQ ID NO: 3226 - DNA, 23 bp, Artificial Sequence
  HLA-A targeting gRNA
tgtgctctcttccccatcccagg

SEQ ID NO: 3227 - DNA, 23 bp, Artificial Sequence
  HLA-A targeting gRNA
ggagtgggagcctgggggcgagg

SEQ ID NO: 3228 - DNA, 23 bp, Artificial Sequence
  HLA-A targeting gRNA
tgtggagaccaagcctgcagggg

SEQ ID NO: 3229 - DNA, 23 bp, Artificial Sequence
  HLA-A targeting gRNA
tgtgggcatcattgctggcctgg

SEQ ID NO: 3230 - DNA, 23 bp, Artificial Sequence
  HLA-A targeting gRNA
tgtggtggtaccttctggaaagg

SEQ ID NO: 3231 - DNA, 23 bp, Artificial Sequence
  HLA-A targeting gRNA
aggggccggagtattgggaccgg

SEQ ID NO: 3232 - DNA, 23 bp, Artificial Sequence
  HLA-A targeting gRNA
ccaccacagctgcccacttctgg

SEQ ID NO: 3233 - DNA, 23 bp, Artificial Sequence
  HLA-A targeting gRNA
ccagaagtgggcagctgtggtgg

SEQ ID NO: 3234 - DNA, 23 bp, Artificial Sequence
  HLA-A targeting gRNA
ttaacccatctcagggtgagggg

SEQ ID NO: 3235 - DNA, 23 bp, Artificial Sequence
  HLA-A targeting gRNA
cttccagaagtgggcagctgtgg

SEQ ID NO: 3236 - DNA, 23 bp, Artificial Sequence
  HLA-A targeting gRNA
ggattacatcgccctgaacgagg

SEQ ID NO: 3237 - DNA, 23 bp, Artificial Sequence
  HLA-A targeting gRNA
agcccagggcccagcacctcagg

SEQ ID NO: 3238 - DNA, 23 bp, Artificial Sequence
  HLA-A targeting gRNA
gcccagggcccagcacctcaggg

SEQ ID NO: 3239 - DNA, 23 bp, Artificial Sequence
  HLA-A targeting gRNA
ttagaccgcggcggacatggcgg

SEQ ID NO: 3240 - DNA, 23 bp, Artificial Sequence
  HLA-A targeting gRNA
ttatcccatctcagggtgagggg

SEQ ID NO: 3241 - DNA, 23 bp, Artificial Sequence
  HLA-A targeting gRNA
ttcacactcaatatgtgtggggg

SEQ ID NO: 3242 - DNA, 23 bp, Artificial Sequence
  HLA-A targeting gRNA
cacagctgcccacttctggaagg

SEQ ID NO: 3243 - DNA, 23 bp, Artificial Sequence
  HLA-A targeting gRNA
ttcacattcgtgtcccggcccgg

SEQ ID NO: 3244 - DNA, 23 bp, Artificial Sequence
  HLA-A targeting gRNA
ctccgcagggtagaagcccaggg

SEQ ID NO: 3245 - DNA, 23 bp, Artificial Sequence
  HLA-A targeting gRNA
ttcatatcactcacagtgagggg

SEQ ID NO: 3246 - DNA, 23 bp, Artificial Sequence
  HLA-A targeting gRNA
ggccctgggcttctaccctgcgg

SEQ ID NO: 3247 - DNA, 23 bp, Artificial Sequence
  HLA-A targeting gRNA
tctccgcagggtagaagcccagg

SEQ ID NO: 3248 - DNA, 23 bp, Artificial Sequence
  HLA-A targeting gRNA
ttcccacagttagaaaaggaggg

SEQ ID NO: 3249 - DNA, 23 bp, Artificial Sequence
  HLA-A targeting gRNA
ttccctttgacacacaccggcgg

SEQ ID NO: 3250 - DNA, 23 bp, Artificial Sequence
  HLA-A targeting gRNA
ttcctctccctcaggagcagagg

SEQ ID NO: 3251 - DNA, 23 bp, Artificial Sequence
  HLA-A targeting gRNA
ctcatggagtgggagcctggggg

SEQ ID NO: 3252 - DNA, 23 bp, Artificial Sequence
  HLA-A targeting gRNA
accctgaggtgctgggccctggg

SEQ ID NO: 3253 - DNA, 23 bp, Artificial Sequence
  HLA-A targeting gRNA
caccctgaggtgctgggccctgg

SEQ ID NO: 3254 - DNA, 23 bp, Artificial Sequence
  HLA-A targeting gRNA
ttcgtgtcccggcccggccgcgg

SEQ ID NO: 3255 - DNA, 23 bp, Artificial Sequence
  HLA-A targeting gRNA
ttctcactccaattgggtgtcgg

SEQ ID NO: 3256 - DNA, 23 bp, Artificial Sequence
  HLA-A targeting gRNA
ttctcactcctattgggtgtcgg

SEQ ID NO: 3257 - DNA, 23 bp, Artificial Sequence
  HLA-A targeting gRNA
ttctctcggtcagtctgtgatgg

SEQ ID NO: 3258 - DNA, 23 bp, Artificial Sequence
  HLA-A targeting gRNA
ttcttctccctcaagaccagagg

SEQ ID NO: 3259 - DNA, 23 bp, Artificial Sequence
  HLA-A targeting gRNA
ttcttgtgggaggccagccccgg

SEQ ID NO: 3260 - DNA, 23 bp, Artificial Sequence
  HLA-A targeting gRNA
ttgaggatggacaggacacctgg

SEQ ID NO: 3261 - DNA, 23 bp, Artificial Sequence
  HLA-A targeting gRNA
ttgagggagaagaatcctcctgg

SEQ ID NO: 3262 - DNA, 23 bp, Artificial Sequence
  HLA-A targeting gRNA
ttgagtgtgaagcagagaacagg

SEQ ID NO: 3263 - DNA, 23 bp, Artificial Sequence
  HLA-A targeting gRNA
ttgcctttcagtcccacacaagg

SEQ ID NO: 3264 - DNA, 23 bp, Artificial Sequence
  HLA-A targeting gRNA
ttgggtgttggggggaacagtgg

SEQ ID NO: 3265 - DNA, 23 bp, Artificial Sequence
  HLA-A targeting gRNA
ttgggtgttgggtggaacagtgg

SEQ ID NO: 3266 - DNA, 23 bp, Artificial Sequence
  HLA-A targeting gRNA
ttgtctccctttcttgtgggagg

SEQ ID NO: 3267 - DNA, 23 bp, Artificial Sequence
  HLA-A targeting gRNA
ttgtggagaccaagcctgcaggg

SEQ ID NO: 3268 - DNA, 23 bp, Artificial Sequence
  HLA-A targeting gRNA
ttgtggttgggagcccatggggg

SEQ ID NO: 3269 - DNA, 23 bp, Artificial Sequence
  HLA-A targeting gRNA
ccccaggctcccactccatgagg

SEQ ID NO: 3270 - DNA, 23 bp, Artificial Sequence
  HLA-A targeting gRNA
cctcatggagtgggagcctgggg

SEQ ID NO: 3271 - DNA, 23 bp, Artificial Sequence
  HLA-A targeting gRNA
tacctcatggagtgggagcctgg

SEQ ID NO: 3272 - DNA, 23 bp, Artificial Sequence
  HLA-A targeting gRNA
acctcatggagtgggagcctggg

SEQ ID NO: 3273 - DNA, 23 bp, Artificial Sequence
  HLA-A targeting gRNA
tttccagagagtgactctgaggg

SEQ ID NO: 3274 - DNA, 23 bp, Artificial Sequence
  HLA-A targeting gRNA
tttcttcccacagttagaaaagg

SEQ ID NO: 3275 - DNA, 23 bp, Artificial Sequence
  HLA-A targeting gRNA
ttttcaagtcacaaagggaaggg

SEQ ID NO: 3276 - DNA, 23 bp, Artificial Sequence
  HLA-A targeting gRNA
tttttcaagtcacaaagggaagg

SEQ ID NO: 3277 - DNA, 23 bp, Artificial Sequence
  HLA-A targeting gRNA
aaaaggagggagctgctctcagg

SEQ ID NO: 3278 - DNA, 23 bp, Artificial Sequence
  HLA-A targeting gRNA
aaaatccccgcgggttgggcggg

SEQ ID NO: 3279 - DNA, 23 bp, Artificial Sequence
  HLA-A targeting gRNA
aaaatccccgcgggttggtcagg

SEQ ID NO: 3280 - DNA, 23 bp, Artificial Sequence
  HLA-A targeting gRNA
aaaatccccgcgggttggtcggg

SEQ ID NO: 3281 - DNA, 23 bp, Artificial Sequence
  HLA-A targeting gRNA
aaaatgccctatgaggggactgg

SEQ ID NO: 3282 - DNA, 23 bp, Artificial Sequence
  HLA-A targeting gRNA
aaaatgccctgtgaggggacagg

SEQ ID NO: 3283 - DNA, 23 bp, Artificial Sequence
  HLA-A targeting gRNA
aaaatgccctgtgaggggactgg

SEQ ID NO: 3284 - DNA, 23 bp, Artificial Sequence
  HLA-A targeting gRNA
aaaatgtcctgtgagggcactgg

SEQ ID NO: 3285 - DNA, 23 bp, Artificial Sequence
  HLA-A targeting gRNA
aaaatgtcctgtgaggggactgg

SEQ ID NO: 3286 - DNA, 23 bp, Artificial Sequence
  HLA-A targeting gRNA
aaacacaaggaaagcaagtgtgg

SEQ ID NO: 3287 - DNA, 23 bp, Artificial Sequence
  HLA-A targeting gRNA
aaacacagggaaagcagctgtgg

SEQ ID NO: 3288 - DNA, 23 bp, Artificial Sequence
  HLA-A targeting gRNA
aaacacgaggaaagcaagtgtgg

SEQ ID NO: 3289 - DNA, 23 bp, Artificial Sequence
  HLA-A targeting gRNA
aaacacggggaaagcagctgtgg

SEQ ID NO: 3290 - DNA, 23 bp, Artificial Sequence
  HLA-A targeting gRNA
aaacatggggaaagcagctgtgg

SEQ ID NO: 3291 - DNA, 23 bp, Artificial Sequence
  HLA-A targeting gRNA
aaacatggggaaagcagttgtgg

SEQ ID NO: 3292 - DNA, 23 bp, Artificial Sequence
  HLA-A targeting gRNA
aaacccctcaccctgagatgggg

SEQ ID NO: 3293 - DNA, 23 bp, Artificial Sequence
  HLA-A targeting gRNA
aaaccgggtaaacgcgcctgggg

SEQ ID NO: 3294 - DNA, 23 bp, Artificial Sequence
  HLA-A targeting gRNA
aaaccgggtaaaggcgactaggg

SEQ ID NO: 3295 - DNA, 23 bp, Artificial Sequence
  HLA-A targeting gRNA
aaaccgggtaaaggcgactgggg

SEQ ID NO: 3296 - DNA, 23 bp, Artificial Sequence
  HLA-A targeting gRNA
aaaccgggtaaaggcgcctgggg

SEQ ID NO: 3297 - DNA, 23 bp, Artificial Sequence
  HLA-A targeting gRNA
aaaccgggtaaaggtgactgggg

SEQ ID NO: 3298 - DNA, 23 bp, Artificial Sequence
  HLA-A targeting gRNA
aaaccgggtaaagtcgcctgggg

SEQ ID NO: 3299 - DNA, 23 bp, Artificial Sequence
  HLA-A targeting gRNA
aaactcaggggagtgggagtggg

SEQ ID NO: 3300 - DNA, 23 bp, Artificial Sequence
  HLA-A targeting gRNA
aaagaataggagattatcccagg

SEQ ID NO: 3301 - DNA, 23 bp, Artificial Sequence
  HLA-A targeting gRNA
aaagagacgctgcagcgcgcagg

SEQ ID NO: 3302 - DNA, 23 bp, Artificial Sequence
  HLA-A targeting gRNA
aaagcaggagcccttcagcaggg

SEQ ID NO: 3303 - DNA, 23 bp, Artificial Sequence
  HLA-A targeting gRNA
aaagcccctcaccctgagatggg

SEQ ID NO: 3304 - DNA, 23 bp, Artificial Sequence
  HLA-A targeting gRNA
aaagtcaccagtcacccacccgg

SEQ ID NO: 3305 - DNA, 23 bp, Artificial Sequence
  HLA-A targeting gRNA
aaagtccccacgcacccacccgg

SEQ ID NO: 3306 - DNA, 23 bp, Artificial Sequence
  HLA-A targeting gRNA
aaagtccccagtcacccacccgg

SEQ ID NO: 3307 - DNA, 23 bp, Artificial Sequence
  HLA-A targeting gRNA
aaagttcgagtctctgagcgggg

SEQ ID NO: 3308 - DNA, 23 bp, Artificial Sequence
  HLA-A targeting gRNA
aaagttcgagtctctgagtgggg

SEQ ID NO: 3309 - DNA, 23 bp, Artificial Sequence
  HLA-A targeting gRNA
aaagttctagtctctgagggagg

SEQ ID NO: 3310 - DNA, 23 bp, Artificial Sequence
  HLA-A targeting gRNA
aaatccccgcgggttgggcgggg

SEQ ID NO: 3311 - DNA, 23 bp, Artificial Sequence
  HLA-A targeting gRNA
aaatccccgcgggttggtcaggg

SEQ ID NO: 3312 - DNA, 23 bp, Artificial Sequence
  HLA-A targeting gRNA
aaatccccgcgggttggtcgggg

SEQ ID NO: 3313 - DNA, 23 bp, Artificial Sequence
  HLA-A targeting gRNA
aaatgatggcggcgggcgtgtgg

SEQ ID NO: 3314 - DNA, 23 bp, Artificial Sequence
  HLA-A targeting gRNA
aaatgccctatgaggggactggg

SEQ ID NO: 3315 - DNA, 23 bp, Artificial Sequence
  HLA-A targeting gRNA
aaatgccctgtgaggggacaggg

SEQ ID NO: 3316 - DNA, 23 bp, Artificial Sequence
  HLA-A targeting gRNA
aaatgccctgtgaggggactggg

SEQ ID NO: 3317 - DNA, 23 bp, Artificial Sequence
  HLA-A targeting gRNA
aaatgtcctgtgagggcactggg

SEQ ID NO: 3318 - DNA, 23 bp, Artificial Sequence
  HLA-A targeting gRNA
aaatgtcctgtgaggggactggg

SEQ ID NO: 3319 - DNA, 23 bp, Artificial Sequence
  HLA-A targeting gRNA
aacaatgcccacgatggggacgg

SEQ ID NO: 3320 - DNA, 23 bp, Artificial Sequence
  HLA-A targeting gRNA
aacaatgcccacgatggggatgg

SEQ ID NO: 3321 - DNA, 23 bp, Artificial Sequence
  HLA-A targeting gRNA
aacacaaggaaagcaagtgtggg

SEQ ID NO: 3322 - DNA, 23 bp, Artificial Sequence
  HLA-A targeting gRNA
aacacagggaaagcagctgtggg

SEQ ID NO: 3323 - DNA, 23 bp, Artificial Sequence
  HLA-A targeting gRNA
aacacgaggaaagcaagtgtggg

SEQ ID NO: 3324 - DNA, 23 bp, Artificial Sequence
  HLA-A targeting gRNA
aacacggggaaagcagctgtggg

SEQ ID NO: 3325 - DNA, 23 bp, Artificial Sequence
  HLA-A targeting gRNA
aacatggggaaagcagctgtggg

SEQ ID NO: 3326 - DNA, 23 bp, Artificial Sequence
  HLA-A targeting gRNA
aacatggggaaagcagttgtggg

SEQ ID NO: 3327 - DNA, 23 bp, Artificial Sequence
  HLA-A targeting gRNA
aacccagggcccagcacctcagg

SEQ ID NO: 3328 - DNA, 23 bp, Artificial Sequence
  HLA-A targeting gRNA
aaccccgcactcacaggcccagg

SEQ ID NO: 3329 - DNA, 23 bp, Artificial Sequence
  HLA-A targeting gRNA
aaccccgcactcaccggcccagg

SEQ ID NO: 3330 - DNA, 23 bp, Artificial Sequence
  HLA-A targeting gRNA
aaccccgcactcaccggtccagg

SEQ ID NO: 3331 - DNA, 23 bp, Artificial Sequence
  HLA-A targeting gRNA
aacccgacacccaatgggagtgg

SEQ ID NO: 3332 - DNA, 23 bp, Artificial Sequence
  HLA-A targeting gRNA
aacccgcccagaccctcgaccgg

SEQ ID NO: 3333 - DNA, 23 bp, Artificial Sequence
  HLA-A targeting gRNA
aacccgcccagaccctcggccgg

SEQ ID NO: 3334 - DNA, 23 bp, Artificial Sequence
  HLA-A targeting gRNA
aacccgcccgaccctcctcccgg

SEQ ID NO: 3335 - DNA, 23 bp, Artificial Sequence
  HLA-A targeting gRNA
aaccctcatcctgctgctctcgg

SEQ ID NO: 3336 - DNA, 23 bp, Artificial Sequence
  HLA-A targeting gRNA
aaccctcctcctgctgctctagg

SEQ ID NO: 3337 - DNA, 23 bp, Artificial Sequence
  HLA-A targeting gRNA
aaccctcctcctgctgctctcgg

SEQ ID NO: 3338 - DNA, 23 bp, Artificial Sequence
  HLA-A targeting gRNA
aaccctcctcctgctgctctggg

SEQ ID NO: 3339 - DNA, 23 bp, Artificial Sequence
  HLA-A targeting gRNA
aaccgtcctcctgctgctctcgg

SEQ ID NO: 3340 - DNA, 23 bp, Artificial Sequence
  HLA-A targeting gRNA
aaccgtcctcctgctgctctggg

SEQ ID NO: 3341 - DNA, 23 bp, Artificial Sequence
  HLA-A targeting gRNA
aacctcgcactcacaggcccagg

SEQ ID NO: 3342 - DNA, 23 bp, Artificial Sequence
  HLA-A targeting gRNA
aacgacgccgcgagtccgagagg

SEQ ID NO: 3343 - DNA, 23 bp, Artificial Sequence
  HLA-A targeting gRNA
aacgagaagaagaggaaaatggg

SEQ ID NO: 3344 - DNA, 23 bp, Artificial Sequence
  HLA-A targeting gRNA
aacgaggtgcccgcccggcgagg

SEQ ID NO: 3345 - DNA, 23 bp, Artificial Sequence
  HLA-A targeting gRNA
aacgatgcccaagttggggatgg

SEQ ID NO: 3346 - DNA, 23 bp, Artificial Sequence
  HLA-A targeting gRNA
aacgatgcccacgatggggatgg

SEQ ID NO: 3347 - DNA, 23 bp, Artificial Sequence
  HLA-A targeting gRNA
aacgatgcccatgatggggatgg

SEQ ID NO: 3348 - DNA, 23 bp, Artificial Sequence
  HLA-A targeting gRNA
aacgcgcctggggctctcgccgg

SEQ ID NO: 3349 - DNA, 23 bp, Artificial Sequence
  HLA-A targeting gRNA
aacggacaggacacctggggtgg

SEQ ID NO: 3350 - DNA, 23 bp, Artificial Sequence
  HLA-A targeting gRNA
aactcaggacacccagcttgtgg

SEQ ID NO: 3351 - DNA, 23 bp, Artificial Sequence
  HLA-A targeting gRNA
aactcaggacaccgagcttgtgg

SEQ ID NO: 3352 - DNA, 23 bp, Artificial Sequence
  HLA-A targeting gRNA
aactcaggacactgagcttgtgg

SEQ ID NO: 3353 - DNA, 23 bp, Artificial Sequence
  HLA-A targeting gRNA
aactcaggggagtgggagtgggg

SEQ ID NO: 3354 - DNA, 23 bp, Artificial Sequence
  HLA-A targeting gRNA
aactctcctcctgctgctctcgg

SEQ ID NO: 3355 - DNA, 23 bp, Artificial Sequence
  HLA-A targeting gRNA
aagaaaagtcatggttcccaagg

SEQ ID NO: 3356 - DNA, 23 bp, Artificial Sequence
  HLA-A targeting gRNA
aagaagacgctgcagcgcgcggg

SEQ ID NO: 3357 - DNA, 23 bp, Artificial Sequence
  HLA-A targeting gRNA
aagaaggacccgacacaagttgg

SEQ ID NO: 3358 - DNA, 23 bp, Artificial Sequence
  HLA-A targeting gRNA
aagaaggacccgacacaggttgg

SEQ ID NO: 3359 - DNA, 23 bp, Artificial Sequence
  HLA-A targeting gRNA
aagaaggacccgacataggttgg

SEQ ID NO: 3360 - DNA, 23 bp, Artificial Sequence
  HLA-A targeting gRNA
aagaaggacccgacgcaggttgg

SEQ ID NO: 3361 - DNA, 23 bp, Artificial Sequence
  HLA-A targeting gRNA
aagaaggacccgtcgcaggttgg

SEQ ID NO: 3362 - DNA, 23 bp, Artificial Sequence
  HLA-A targeting gRNA
aagacctggtcagagcccacagg

SEQ ID NO: 3363 - DNA, 23 bp, Artificial Sequence
  HLA-A targeting gRNA
aagacctggtcagagcccgcagg

SEQ ID NO: 3364 - DNA, 23 bp, Artificial Sequence
  HLA-A targeting gRNA
aagacggctccgggaaaggaagg

SEQ ID NO: 3365 - DNA, 23 bp, Artificial Sequence
  HLA-A targeting gRNA
aagacggctctgggaaaggaagg

SEQ ID NO: 3366 - DNA, 23 bp, Artificial Sequence
  HLA-A targeting gRNA
aagacggctctgggaaaggaggg

SEQ ID NO: 3367 - DNA, 23 bp, Artificial Sequence
  HLA-A targeting gRNA
aagagcccctcaccctgagctgg

SEQ ID NO: 3368 - DNA, 23 bp, Artificial Sequence
  HLA-A targeting gRNA
aagagctcaggtggaaaaggagg

SEQ ID NO: 3369 - DNA, 23 bp, Artificial Sequence
  HLA-A targeting gRNA
aagagtaagttctggcacacagg

SEQ ID NO: 3370 - DNA, 23 bp, Artificial Sequence
  HLA-A targeting gRNA
aagatggccctgggaaaggaggg

SEQ ID NO: 3371 - DNA, 23 bp, Artificial Sequence
  HLA-A targeting gRNA
aagatggctctgggaaaggaggg

SEQ ID NO: 3372 - DNA, 23 bp, Artificial Sequence
  HLA-A targeting gRNA
aagcggagctccccgcggccggg

SEQ ID NO: 3373 - DNA, 23 bp, Artificial Sequence
  HLA-A targeting gRNA
aagcggcctctgcggagaggagg

SEQ ID NO: 3374 - DNA, 23 bp, Artificial Sequence
  HLA-A targeting gRNA
aagcgggactctccgcggccggg

SEQ ID NO: 3375 - DNA, 23 bp, Artificial Sequence
  HLA-A targeting gRNA
aagcggggctccccacggccggg

SEQ ID NO: 3376 - DNA, 23 bp, Artificial Sequence
  HLA-A targeting gRNA
aagcggggctccccgcagccggg

SEQ ID NO: 3377 - DNA, 23 bp, Artificial Sequence
  HLA-A targeting gRNA
aagcggggctccccgcggccagg

SEQ ID NO: 3378 - DNA, 23 bp, Artificial Sequence
  HLA-A targeting gRNA
aagcggggctccccgctgccggg

SEQ ID NO: 3379 - DNA, 23 bp, Artificial Sequence
  HLA-A targeting gRNA
aagcggggctctccgcggccagg

SEQ ID NO: 3380 - DNA, 23 bp, Artificial Sequence
  HLA-A targeting gRNA
aagcggggctctccgcggccggg

SEQ ID NO: 3381 - DNA, 23 bp, Artificial Sequence
  HLA-A targeting gRNA
aagcggggctctccgcggcctgg

SEQ ID NO: 3382 - DNA, 23 bp, Artificial Sequence
  HLA-A targeting gRNA
aagcggtgctctccgcggccagg

SEQ ID NO: 3383 - DNA, 23 bp, Artificial Sequence
  HLA-A targeting gRNA
aaggaaacgctgcagcgcgcggg

SEQ ID NO: 3384 - DNA, 23 bp, Artificial Sequence
  HLA-A targeting gRNA
aaggacaagctggagcgcgctgg

SEQ ID NO: 3385 - DNA, 23 bp, Artificial Sequence
  HLA-A targeting gRNA
aaggacacgctggagcgcgcggg

SEQ ID NO: 3386 - DNA, 23 bp, Artificial Sequence
  HLA-A targeting gRNA
aaggagaccctgcagcgcgcggg

SEQ ID NO: 3387 - DNA, 23 bp, Artificial Sequence
  HLA-A targeting gRNA
aaggagacgctgcaacgcgcggg

SEQ ID NO: 3388 - DNA, 23 bp, Artificial Sequence
  HLA-A targeting gRNA
aaggagacgctgcagagcgcggg

SEQ ID NO: 3389 - DNA, 23 bp, Artificial Sequence
  HLA-A targeting gRNA
aaggagacgctgcagcacgcggg

SEQ ID NO: 3390 - DNA, 23 bp, Artificial Sequence
  HLA-A targeting gRNA
aaggagacgctgcagcgcgcagg

SEQ ID NO: 3391 - DNA, 23 bp, Artificial Sequence
  HLA-A targeting gRNA
aaggagacgctggagcgcgcggg

SEQ ID NO: 3392 - DNA, 23 bp, Artificial Sequence
  HLA-A targeting gRNA
aaggcacagactgaccgagtggg

SEQ ID NO: 3393 - DNA, 23 bp, Artificial Sequence
  HLA-A targeting gRNA
aaggcccaggcacagactgacgg

SEQ ID NO: 3394 - DNA, 23 bp, Artificial Sequence
  HLA-A targeting gRNA
aaggcctgagaggaaagtcacgg

SEQ ID NO: 3395 - DNA, 23 bp, Artificial Sequence
  HLA-A targeting gRNA
aaggcgactagggctctctccgg

SEQ ID NO: 3396 - DNA, 23 bp, Artificial Sequence
  HLA-A targeting gRNA
aaggcgactggggctctctccgg

SEQ ID NO: 3397 - DNA, 23 bp, Artificial Sequence
  HLA-A targeting gRNA
aaggcgcctggggctctcgccgg

SEQ ID NO: 3398 - DNA, 23 bp, Artificial Sequence
  HLA-A targeting gRNA
aaggctgctgcaggggtcaaagg

SEQ ID NO: 3399 - DNA, 23 bp, Artificial Sequence
  HLA-A targeting gRNA
aaggggagccgcgggcgccgtgg

SEQ ID NO: 3400 - DNA, 23 bp, Artificial Sequence
  HLA-A targeting gRNA
aaggggtgaagagcggggtctgg

SEQ ID NO: 3401 - DNA, 23 bp, Artificial Sequence
  HLA-A targeting gRNA
aaggggtgaggagtggggtctgg

SEQ ID NO: 3402 - DNA, 23 bp, Artificial Sequence
  HLA-A targeting gRNA
aaggggtgaggggtggggtctgg

SEQ ID NO: 3403 - DNA, 23 bp, Artificial Sequence
  HLA-A targeting gRNA
aaggggtggggagtggggtctgg

SEQ ID NO: 3404 - DNA, 23 bp, Artificial Sequence
  HLA-A targeting gRNA
aaggtgactggggctctctccgg

SEQ ID NO: 3405 - DNA, 23 bp, Artificial Sequence
  HLA-A targeting gRNA
aagtccctgaggaaatggagggg

SEQ ID NO: 3406 - DNA, 23 bp, Artificial Sequence
  HLA-A targeting gRNA
aagtccgagaggggagccccggg

SEQ ID NO: 3407 - DNA, 23 bp, Artificial Sequence
  HLA-A targeting gRNA
aagtcctggagcccttcagccgg

SEQ ID NO: 3408 - DNA, 23 bp, Artificial Sequence
  HLA-A targeting gRNA
aagtcctggagcccttcagctgg

SEQ ID NO: 3409 - DNA, 23 bp, Artificial Sequence
  HLA-A targeting gRNA
aagtccttgaggaaatggagggg

SEQ ID NO: 3410 - DNA, 23 bp, Artificial Sequence
  HLA-A targeting gRNA
aagtcgcctggggctctctgcgg

SEQ ID NO: 3411 - DNA, 23 bp, Artificial Sequence
  HLA-A targeting gRNA
aagtctctgaggaaatggagggg

SEQ ID NO: 3412 - DNA, 23 bp, Artificial Sequence
  HLA-A targeting gRNA
aagtgaaactcagggaagtgggg

SEQ ID NO: 3413 - DNA, 23 bp, Artificial Sequence
  HLA-A targeting gRNA
aagtgaaactcaggggagtgggg

SEQ ID NO: 3414 - DNA, 23 bp, Artificial Sequence
  HLA-A targeting gRNA
aagtgaaactcgtgggagtgggg

SEQ ID NO: 3415 - DNA, 23 bp, Artificial Sequence
  HLA-A targeting gRNA
aagtgaaactcttgggagtgggg

SEQ ID NO: 3416 - DNA, 23 bp, Artificial Sequence
  HLA-A targeting gRNA
aagtgatgccggtgggcgtgtgg

SEQ ID NO: 3417 - DNA, 23 bp, Artificial Sequence
  HLA-A targeting gRNA
aagtgatggcagtgggcgtgtgg

SEQ ID NO: 3418 - DNA, 23 bp, Artificial Sequence
  HLA-A targeting gRNA
aagtgatggcggcaggcgtgtgg

SEQ ID NO: 3419 - DNA, 23 bp, Artificial Sequence
  HLA-A targeting gRNA
aagtgatggcggcgggcgtgtgg

SEQ ID NO: 3420 - DNA, 23 bp, Artificial Sequence
  HLA-A targeting gRNA
aagtgatggcggtggccgtgtgg

SEQ ID NO: 3421 - DNA, 23 bp, Artificial Sequence
  HLA-A targeting gRNA
aagtgatggcggtgggcgtgtgg

SEQ ID NO: 3422 - DNA, 23 bp, Artificial Sequence
  HLA-A targeting gRNA
aagtgatgggggcgggagtgtgg

SEQ ID NO: 3423 - DNA, 23 bp, Artificial Sequence
  HLA-A targeting gRNA
aagtgatgggggtgggagtgtgg

SEQ ID NO: 3424 - DNA, 23 bp, Artificial Sequence
  HLA-A targeting gRNA
aagtgccatgttcagcacgaggg

SEQ ID NO: 3425 - DNA, 23 bp, Artificial Sequence
  HLA-A targeting gRNA
aagtggggctccccgcggccggg

SEQ ID NO: 3426 - DNA, 23 bp, Artificial Sequence
  HLA-A targeting gRNA
aagtggggctctccgcggccggg

SEQ ID NO: 3427 - DNA, 23 bp, Artificial Sequence
  HLA-A targeting gRNA
aagtggggctctccgcggctggg

SEQ ID NO: 3428 - DNA, 23 bp, Artificial Sequence
  HLA-A targeting gRNA
aagtggtgggggtgggagtgtgg

SEQ ID NO: 3429 - DNA, 23 bp, Artificial Sequence
  HLA-A targeting gRNA
aatacctggtcagagcccgcagg

SEQ ID NO: 3430 - DNA, 23 bp, Artificial Sequence
  HLA-A targeting gRNA
aatatgtatggctgcgacgtggg

SEQ ID NO: 3431 - DNA, 23 bp, Artificial Sequence
  HLA-A targeting gRNA
aatcagcgtctacgcagtcccgg

SEQ ID NO: 3432 - DNA, 23 bp, Artificial Sequence
  HLA-A targeting gRNA
aatcagcgtctccgcagtaccgg

SEQ ID NO: 3433 - DNA, 23 bp, Artificial Sequence
  HLA-A targeting gRNA
aatcagcgtctccgcagtccagg

SEQ ID NO: 3434 - DNA, 23 bp, Artificial Sequence
  HLA-A targeting gRNA
aatcagcgtctccgcagtcccgg

SEQ ID NO: 3435 - DNA, 23 bp, Artificial Sequence
  HLA-A targeting gRNA
aatccgacacccaatgggagtgg

SEQ ID NO: 3436 - DNA, 23 bp, Artificial Sequence
  HLA-A targeting gRNA
aatccgcccagaccctcgaccgg

SEQ ID NO: 3437 - DNA, 23 bp, Artificial Sequence
  HLA-A targeting gRNA
aatctgagccgcggtgtccgcgg

SEQ ID NO: 3438 - DNA, 23 bp, Artificial Sequence
  HLA-A targeting gRNA
aatgaataggagattatcccagg

SEQ ID NO: 3439 - DNA, 23 bp, Artificial Sequence
  HLA-A targeting gRNA
aatgcccacgatggggacagtgg

SEQ ID NO: 3440 - DNA, 23 bp, Artificial Sequence
  HLA-A targeting gRNA
aatgcccacgatggggacggtgg

SEQ ID NO: 3441 - DNA, 23 bp, Artificial Sequence
  HLA-A targeting gRNA
aatgcccacgatggggatggtgg

SEQ ID NO: 3442 - DNA, 23 bp, Artificial Sequence
  HLA-A targeting gRNA
aatggacaggacacctggggtgg

SEQ ID NO: 3443 - DNA, 23 bp, Artificial Sequence
  HLA-A targeting gRNA
aatggacaggacacctggtgtgg

SEQ ID NO: 3444 - DNA, 23 bp, Artificial Sequence
  HLA-A targeting gRNA
aatggacgggacacctggggtgg

SEQ ID NO: 3445 - DNA, 23 bp, Artificial Sequence
  HLA-A targeting gRNA
aatgggcaggacacctggggtgg

SEQ ID NO: 3446 - DNA, 23 bp, Artificial Sequence
  HLA-A targeting gRNA
aatggggaggcgcagcgttgggg

SEQ ID NO: 3447 - DNA, 23 bp, Artificial Sequence
  HLA-A targeting gRNA
aattcaggacactgagcttgtgg

SEQ ID NO: 3448 - DNA, 23 bp, Artificial Sequence
  HLA-A targeting gRNA
aattgtcctagacagcagagggg

SEQ ID NO: 3449 - DNA, 23 bp, Artificial Sequence
  HLA-A targeting gRNA
aattgtcctagagagaagagggg

SEQ ID NO: 3450 - DNA, 23 bp, Artificial Sequence
  HLA-A targeting gRNA
aattgtcctagagagcagacggg

SEQ ID NO: 3451 - DNA, 23 bp, Artificial Sequence
  HLA-A targeting gRNA
aattgtcctagagagcagagggg

SEQ ID NO: 3452 - DNA, 23 bp, Artificial Sequence
  HLA-A targeting gRNA
aattgtctagagagaagaggggg

SEQ ID NO: 3453 - DNA, 23 bp, Artificial Sequence
  HLA-A targeting gRNA
acacaggggctaacacagcctgg

SEQ ID NO: 3454 - DNA, 23 bp, Artificial Sequence
  HLA-A targeting gRNA
acacaggggctaacgcagactgg

SEQ ID NO: 3455 - DNA, 23 bp, Artificial Sequence
  HLA-A targeting gRNA
acacaggggctaacgcagcctgg

SEQ ID NO: 3456 - DNA, 23 bp, Artificial Sequence
  HLA-A targeting gRNA
acacaggggctaatgcagcctgg

SEQ ID NO: 3457 - DNA, 23 bp, Artificial Sequence
  HLA-A targeting gRNA
acacatgggccatcccagcctgg

SEQ ID NO: 3458 - DNA, 23 bp, Artificial Sequence
  HLA-A targeting gRNA
acacatgtgacaatgaaggacgg

SEQ ID NO: 3459 - DNA, 23 bp, Artificial Sequence
  HLA-A targeting gRNA
acacccagcttgtggagaccagg

SEQ ID NO: 3460 - DNA, 23 bp, Artificial Sequence
  HLA-A targeting gRNA
acaccgagcttgtggagaccagg

SEQ ID NO: 3461 - DNA, 23 bp, Artificial Sequence
  HLA-A targeting gRNA
acacctgggccatcccagcctgg

SEQ ID NO: 3462 - DNA, 23 bp, Artificial Sequence
  HLA-A targeting gRNA
acacgggccgcctcccacttggg

SEQ ID NO: 3463 - DNA, 23 bp, Artificial Sequence
  HLA-A targeting gRNA
acacgtgggccatcccagcctgg

SEQ ID NO: 3464 - DNA, 23 bp, Artificial Sequence
  HLA-A targeting gRNA
acactgacctggcagtgggatgg

SEQ ID NO: 3465 - DNA, 23 bp, Artificial Sequence
  HLA-A targeting gRNA
acactgacctggtagcgggatgg

SEQ ID NO: 3466 - DNA, 23 bp, Artificial Sequence
  HLA-A targeting gRNA
acactgagcttgtggagaccagg

SEQ ID NO: 3467 - DNA, 23 bp, Artificial Sequence
  HLA-A targeting gRNA
acactgatctggcagtgggatgg

SEQ ID NO: 3468 - DNA, 23 bp, Artificial Sequence
  HLA-A targeting gRNA
acagaacccaaacaccagcctgg

SEQ ID NO: 3469 - DNA, 23 bp, Artificial Sequence
  HLA-A targeting gRNA
acagaacccagacaccagcccgg

SEQ ID NO: 3470 - DNA, 23 bp, Artificial Sequence
  HLA-A targeting gRNA
acagaacccagacgccagcctgg

SEQ ID NO: 3471 - DNA, 23 bp, Artificial Sequence
  HLA-A targeting gRNA
acagaccttaggagagcagttgg

SEQ ID NO: 3472 - DNA, 23 bp, Artificial Sequence
  HLA-A targeting gRNA
acagaccttaggagggcagttgg

SEQ ID NO: 3473 - DNA, 23 bp, Artificial Sequence
  HLA-A targeting gRNA
acagcagagggggccctcagagg

SEQ ID NO: 3474 - DNA, 23 bp, Artificial Sequence
  HLA-A targeting gRNA
acagccacgccgcgagtccgagg

SEQ ID NO: 3475 - DNA, 23 bp, Artificial Sequence
  HLA-A targeting gRNA
acagcccctcgtgctgcacatgg

SEQ ID NO: 3476 - DNA, 23 bp, Artificial Sequence
  HLA-A targeting gRNA
acagcgacgccacgagtccgagg

SEQ ID NO: 3477 - DNA, 23 bp, Artificial Sequence
  HLA-A targeting gRNA
acagcgacgccgcgagtccgagg

SEQ ID NO: 3478 - DNA, 23 bp, Artificial Sequence
  HLA-A targeting gRNA
acagcgacgctgcgagtccgagg

SEQ ID NO: 3479 - DNA, 23 bp, Artificial Sequence
  HLA-A targeting gRNA
acagctgtggtggtgccttctgg

SEQ ID NO: 3480 - DNA, 23 bp, Artificial Sequence
  HLA-A targeting gRNA
acaggaacgcagacacattcagg

SEQ ID NO: 3481 - DNA, 23 bp, Artificial Sequence
  HLA-A targeting gRNA
acaggacatttgcttcccacagg

SEQ ID NO: 3482 - DNA, 23 bp, Artificial Sequence
  HLA-A targeting gRNA
acaggacattttcttcccacagg

SEQ ID NO: 3483 - DNA, 23 bp, Artificial Sequence
  HLA-A targeting gRNA
acaggcccaggtctcggtcaggg

SEQ ID NO: 3484 - DNA, 23 bp, Artificial Sequence
  HLA-A targeting gRNA
acagggacacagacacattcagg

SEQ ID NO: 3485 - DNA, 23 bp, Artificial Sequence
  HLA-A targeting gRNA
acagggacgcagacacattcagg

SEQ ID NO: 3486 - DNA, 23 bp, Artificial Sequence
  HLA-A targeting gRNA
acagggcattttcttcccacagg

SEQ ID NO: 3487 - DNA, 23 bp, Artificial Sequence
  HLA-A targeting gRNA
acaggggctaacgcagcctgggg

SEQ ID NO: 3488 - DNA, 23 bp, Artificial Sequence
  HLA-A targeting gRNA
acatctctgaggaaatggagggg

SEQ ID NO: 3489 - DNA, 23 bp, Artificial Sequence
  HLA-A targeting gRNA
acatgccaggtacagcatgaggg

SEQ ID NO: 3490 - DNA, 23 bp, Artificial Sequence
  HLA-A targeting gRNA
acatgccatgtacagcatgaggg

SEQ ID NO: 3491 - DNA, 23 bp, Artificial Sequence
  HLA-A targeting gRNA
accagcccaggtctcggtcaggg

SEQ ID NO: 3492 - DNA, 23 bp, Artificial Sequence
  HLA-A targeting gRNA
accagcggacgcaggcacctggg

SEQ ID NO: 3493 - DNA, 23 bp, Artificial Sequence
  HLA-A targeting gRNA
accagcggatgcaggcacctggg

SEQ ID NO: 3494 - DNA, 23 bp, Artificial Sequence
  HLA-A targeting gRNA
accagtacgcctacgacggcagg

SEQ ID NO: 3495 - DNA, 23 bp, Artificial Sequence
  HLA-A targeting gRNA
accagtcacccacccggactcgg

SEQ ID NO: 3496 - DNA, 23 bp, Artificial Sequence
  HLA-A targeting gRNA
acccaatgggagtgggaaatggg

SEQ ID NO: 3497 - DNA, 23 bp, Artificial Sequence
  HLA-A targeting gRNA
acccaatgggagtgggaagtggg

SEQ ID NO: 3498 - DNA, 23 bp, Artificial Sequence
  HLA-A targeting gRNA
acccaatgggagtgggaattggg

SEQ ID NO: 3499 - DNA, 23 bp, Artificial Sequence
  HLA-A targeting gRNA
acccagacaccagcggacgcagg

SEQ ID NO: 3500 - DNA, 23 bp, Artificial Sequence
  HLA-A targeting gRNA
acccagacaccagcggatgcagg

SEQ ID NO: 3501 - DNA, 23 bp, Artificial Sequence
  HLA-A targeting gRNA
acccagggcccagcacctcaggg

SEQ ID NO: 3502 - DNA, 23 bp, Artificial Sequence
  HLA-A targeting gRNA
accccaacaccataatatcaagg

SEQ ID NO: 3503 - DNA, 23 bp, Artificial Sequence
  HLA-A targeting gRNA
accccacgcacaggccctccagg

SEQ ID NO: 3504 - DNA, 23 bp, Artificial Sequence
  HLA-A targeting gRNA
acccgacacccaatgggagtggg

SEQ ID NO: 3505 - DNA, 23 bp, Artificial Sequence
  HLA-A targeting gRNA
acccgcccaggtctcggtcaggg

SEQ ID NO: 3506 - DNA, 23 bp, Artificial Sequence
  HLA-A targeting gRNA
acccgcggaggaggcgcccgtgg

SEQ ID NO: 3507 - DNA, 23 bp, Artificial Sequence
  HLA-A targeting gRNA
acccgggaagccgcgcagggagg

SEQ ID NO: 3508 - DNA, 23 bp, Artificial Sequence
  HLA-A targeting gRNA
acccggggagccgcgcagggagg

SEQ ID NO: 3509 - DNA, 23 bp, Artificial Sequence
  HLA-A targeting gRNA
acccggggagccgcgccgggagg

SEQ ID NO: 3510 - DNA, 23 bp, Artificial Sequence
  HLA-A targeting gRNA
acccggggagccgcgccggtagg

SEQ ID NO: 3511 - DNA, 23 bp, Artificial Sequence
  HLA-A targeting gRNA
acccggggagcggcgcagggagg

SEQ ID NO: 3512 - DNA, 23 bp, Artificial Sequence
  HLA-A targeting gRNA
accctcatcctgctgctctcggg

SEQ ID NO: 3513 - DNA, 23 bp, Artificial Sequence
  HLA-A targeting gRNA
accctcctcctgctgctctaggg

SEQ ID NO: 3514 - DNA, 23 bp, Artificial Sequence
  HLA-A targeting gRNA
accctcctcctgctgctctcggg

SEQ ID NO: 3515 - DNA, 23 bp, Artificial Sequence
  HLA-A targeting gRNA
accctcctcctgctgctctgggg

SEQ ID NO: 3516 - DNA, 23 bp, Artificial Sequence
  HLA-A targeting gRNA
accctgagatggagtaaggaggg

SEQ ID NO: 3517 - DNA, 23 bp, Artificial Sequence
  HLA-A targeting gRNA
accctgagctggggtaaggaggg

SEQ ID NO: 3518 - DNA, 23 bp, Artificial Sequence
  HLA-A targeting gRNA
accctgaggtgctgggccatggg

SEQ ID NO: 3519 - DNA, 23 bp, Artificial Sequence
  HLA-A targeting gRNA
accggaacacacagatcttcagg

SEQ ID NO: 3520 - DNA, 23 bp, Artificial Sequence
  HLA-A targeting gRNA
accggcccaggtctcgatcaggg

SEQ ID NO: 3521 - DNA, 23 bp, Artificial Sequence
  HLA-A targeting gRNA
accggcccaggtctcggtcaggg

SEQ ID NO: 3522 - DNA, 23 bp, Artificial Sequence
  HLA-A targeting gRNA
accgggctgaccacgggggcggg

SEQ ID NO: 3523 - DNA, 23 bp, Artificial Sequence
  HLA-A targeting gRNA
accggtcatacccgcggaggagg

SEQ ID NO: 3524 - DNA, 23 bp, Artificial Sequence
  HLA-A targeting gRNA
accggtccaggtctcgatcaggg

SEQ ID NO: 3525 - DNA, 23 bp, Artificial Sequence
  HLA-A targeting gRNA
accggtgagtgaccccggcccgg

SEQ ID NO: 3526 - DNA, 23 bp, Artificial Sequence
  HLA-A targeting gRNA
accgtcctcctgctgctctcggg

SEQ ID NO: 3527 - DNA, 23 bp, Artificial Sequence
  HLA-A targeting gRNA
accgtcctcctgctgctctgggg

SEQ ID NO: 3528 - DNA, 23 bp, Artificial Sequence
  HLA-A targeting gRNA
accgtgagtgaccccggcccggg

SEQ ID NO: 3529 - DNA, 23 bp, Artificial Sequence
  HLA-A targeting gRNA
accgtggtggttgtggtgttggg

SEQ ID NO: 3530 - DNA, 23 bp, Artificial Sequence
  HLA-A targeting gRNA
acctcaactgaaaatgaaaccgg

SEQ ID NO: 3531 - DNA, 23 bp, Artificial Sequence
  HLA-A targeting gRNA
acctcaaggagtgggagcctggg

SEQ ID NO: 3532 - DNA, 23 bp, Artificial Sequence
  HLA-A targeting gRNA
acctcatgaagtgggagcctggg

SEQ ID NO: 3533 - DNA, 23 bp, Artificial Sequence
  HLA-A targeting gRNA
acctcatggagagggagcctggg

SEQ ID NO: 3534 - DNA, 23 bp, Artificial Sequence
  HLA-A targeting gRNA
acctcatggagtggaagcctggg

SEQ ID NO: 3535 - DNA, 23 bp, Artificial Sequence
  HLA-A targeting gRNA
acctcatggagtgggaacctggg

SEQ ID NO: 3536 - DNA, 23 bp, Artificial Sequence
  HLA-A targeting gRNA
acctcatggagtgggagactggg

SEQ ID NO: 3537 - DNA, 23 bp, Artificial Sequence
  HLA-A targeting gRNA
acctcccggcgcggctccccggg

SEQ ID NO: 3538 - DNA, 23 bp, Artificial Sequence
  HLA-A targeting gRNA
acctccctgcgccgctccccggg

SEQ ID NO: 3539 - DNA, 23 bp, Artificial Sequence
  HLA-A targeting gRNA
acctccctgcgcggctccccggg

SEQ ID NO: 3540 - DNA, 23 bp, Artificial Sequence
  HLA-A targeting gRNA
acctcgatggttgtggtgttggg

SEQ ID NO: 3541 - DNA, 23 bp, Artificial Sequence
  HLA-A targeting gRNA
acctgagctcctggcggacacgg

SEQ ID NO: 3542 - DNA, 23 bp, Artificial Sequence
  HLA-A targeting gRNA
acctgaggagccgcgccgggagg

SEQ ID NO: 3543 - DNA, 23 bp, Artificial Sequence
  HLA-A targeting gRNA
acctgcgcggctactacaaccgg

SEQ ID NO: 3544 - DNA, 23 bp, Artificial Sequence
  HLA-A targeting gRNA
acctgcgctcctggaccgccggg

SEQ ID NO: 3545 - DNA, 23 bp, Artificial Sequence
  HLA-A targeting gRNA
acctgcgctcctggacgcggcgg

SEQ ID NO: 3546 - DNA, 23 bp, Artificial Sequence
  HLA-A targeting gRNA
acctggagggcctgtgcgtgggg

SEQ ID NO: 3547 - DNA, 23 bp, Artificial Sequence
  HLA-A targeting gRNA
acctggatgatgtgagaccctgg

SEQ ID NO: 3548 - DNA, 23 bp, Artificial Sequence
  HLA-A targeting gRNA
acctgggataatctattcattgg

SEQ ID NO: 3549 - DNA, 23 bp, Artificial Sequence
  HLA-A targeting gRNA
accttaatggttgtggtgttggg

SEQ ID NO: 3550 - DNA, 23 bp, Artificial Sequence
  HLA-A targeting gRNA
accttgatattatggtgttgggg

SEQ ID NO: 3551 - DNA, 23 bp, Artificial Sequence
  HLA-A targeting gRNA
accttgatgattatggtgttggg

SEQ ID NO: 3552 - DNA, 23 bp, Artificial Sequence
  HLA-A targeting gRNA
accttgatggttgtggtgttggg

SEQ ID NO: 3553 - DNA, 23 bp, Artificial Sequence
  HLA-A targeting gRNA
accttggggtggatctcagacgg

SEQ ID NO: 3554 - DNA, 23 bp, Artificial Sequence
  HLA-A targeting gRNA
accttggtggttgtggcgttggg

SEQ ID NO: 3555 - DNA, 23 bp, Artificial Sequence
  HLA-A targeting gRNA
accttggtggttgtggtgttggg

SEQ ID NO: 3556 - DNA, 23 bp, Artificial Sequence
  HLA-A targeting gRNA
acgaagtcccaggccccgggcgg

SEQ ID NO: 3557 - DNA, 23 bp, Artificial Sequence
  HLA-A targeting gRNA
acgaagtcccaggtcccggacgg

SEQ ID NO: 3558 - DNA, 23 bp, Artificial Sequence
  HLA-A targeting gRNA
acgaagtcccaggtcccgggcgg

SEQ ID NO: 3559 - DNA, 23 bp, Artificial Sequence
  HLA-A targeting gRNA
acgaagtcccatgtcccggacgg

SEQ ID NO: 3560 - DNA, 23 bp, Artificial Sequence
  HLA-A targeting gRNA
acgacgccgcgagtccgagaggg

SEQ ID NO: 3561 - DNA, 23 bp, Artificial Sequence
  HLA-A targeting gRNA
acgaggacctgagctcctggcgg

SEQ ID NO: 3562 - DNA, 23 bp, Artificial Sequence
  HLA-A targeting gRNA
acgaggtgcccgcccggcgaggg

SEQ ID NO: 3563 - DNA, 23 bp, Artificial Sequence
  HLA-A targeting gRNA
acgatgtacggctgcgacgtggg

SEQ ID NO: 3564 - DNA, 23 bp, Artificial Sequence
  HLA-A targeting gRNA
acgatgtatggctgcgacatggg

SEQ ID NO: 3565 - DNA, 23 bp, Artificial Sequence
  HLA-A targeting gRNA
acgatgtatggctgcgacctggg

SEQ ID NO: 3566 - DNA, 23 bp, Artificial Sequence
  HLA-A targeting gRNA
acgatgtatggctgcgacgtggg

SEQ ID NO: 3567 - DNA, 23 bp, Artificial Sequence
  HLA-A targeting gRNA
acgcgggtaccaggggcagtggg

SEQ ID NO: 3568 - DNA, 23 bp, Artificial Sequence
  HLA-A targeting gRNA
acgctgcagcgcgcgggtaccgg

SEQ ID NO: 3569 - DNA, 23 bp, Artificial Sequence
  HLA-A targeting gRNA
acggacaggacacctggggtggg

SEQ ID NO: 3570 - DNA, 23 bp, Artificial Sequence
  HLA-A targeting gRNA
acggccgggccgggacatggcgg

SEQ ID NO: 3571 - DNA, 23 bp, Artificial Sequence
  HLA-A targeting gRNA
acggcggtgtagatacctcatgg

SEQ ID NO: 3572 - DNA, 23 bp, Artificial Sequence
  HLA-A targeting gRNA
acgggctgaccacgggggcgggg

SEQ ID NO: 3573 - DNA, 23 bp, Artificial Sequence
  HLA-A targeting gRNA
acggggctgaccacgggggcggg

SEQ ID NO: 3574 - DNA, 23 bp, Artificial Sequence
  HLA-A targeting gRNA
acggggctgaccgcggggccggg

SEQ ID NO: 3575 - DNA, 23 bp, Artificial Sequence
  HLA-A targeting gRNA
acggggctgaccgcggggcctgg

SEQ ID NO: 3576 - DNA, 23 bp, Artificial Sequence
  HLA-A targeting gRNA
acggggctgaccgcgggggcggg

SEQ ID NO: 3577 - DNA, 23 bp, Artificial Sequence
  HLA-A targeting gRNA
acggggctggccgcggggccggg

SEQ ID NO: 3578 - DNA, 23 bp, Artificial Sequence
  HLA-A targeting gRNA
acggtgagtgaccccggcctggg

SEQ ID NO: 3579 - DNA, 23 bp, Artificial Sequence
  HLA-A targeting gRNA
acggtgcccaaggctgctgcagg

SEQ ID NO: 3580 - DNA, 23 bp, Artificial Sequence
  HLA-A targeting gRNA
acggtgctgaccgcggggccggg

SEQ ID NO: 3581 - DNA, 23 bp, Artificial Sequence
  HLA-A targeting gRNA
acggttcccaaggctgctgcagg

SEQ ID NO: 3582 - DNA, 23 bp, Artificial Sequence
  HLA-A targeting gRNA
acgtcatggagtgggagcctggg

SEQ ID NO: 3583 - DNA, 23 bp, Artificial Sequence
  HLA-A targeting gRNA
acgtctctgaggaaatggagggg

SEQ ID NO: 3584 - DNA, 23 bp, Artificial Sequence
  HLA-A targeting gRNA
acgtctctgaggaaatgtagggg

SEQ ID NO: 3585 - DNA, 23 bp, Artificial Sequence
  HLA-A targeting gRNA
acgtgccatatgcagcacgaggg

SEQ ID NO: 3586 - DNA, 23 bp, Artificial Sequence
  HLA-A targeting gRNA
acgtgccatgtgcagcacgaggg

SEQ ID NO: 3587 - DNA, 23 bp, Artificial Sequence
  HLA-A targeting gRNA
acgtgccatgtgcagcatgaggg

SEQ ID NO: 3588 - DNA, 23 bp, Artificial Sequence
  HLA-A targeting gRNA
acgtgccatgttcagcacgaggg

SEQ ID NO: 3589 - DNA, 23 bp, Artificial Sequence
  HLA-A targeting gRNA
acgtgcgtggagtggctccgcgg

SEQ ID NO: 3590 - DNA, 23 bp, Artificial Sequence
  HLA-A targeting gRNA
acgtgggacaggaggaattaggg

SEQ ID NO: 3591 - DNA, 23 bp, Artificial Sequence
  HLA-A targeting gRNA
acgtgggacaggaggaattatgg

SEQ ID NO: 3592 - DNA, 23 bp, Artificial Sequence
  HLA-A targeting gRNA
acgttggacaggaggaattatgg

SEQ ID NO: 3593 - DNA, 23 bp, Artificial Sequence
  HLA-A targeting gRNA
actacaaccagagcgaggccggg

SEQ ID NO: 3594 - DNA, 23 bp, Artificial Sequence
  HLA-A targeting gRNA
actagaactttccaaagaatagg

SEQ ID NO: 3595 - DNA, 23 bp, Artificial Sequence
  HLA-A targeting gRNA
actagaactttccaatgaatagg

SEQ ID NO: 3596 - DNA, 23 bp, Artificial Sequence
  HLA-A targeting gRNA
actagggctctctccggtcgagg

SEQ ID NO: 3597 - DNA, 23 bp, Artificial Sequence
  HLA-A targeting gRNA
actcatgaatgctggaatcaagg

SEQ ID NO: 3598 - DNA, 23 bp, Artificial Sequence
  HLA-A targeting gRNA
actccacacacaggccctccagg

SEQ ID NO: 3599 - DNA, 23 bp, Artificial Sequence
  HLA-A targeting gRNA
actccacacacgtgccctccagg

SEQ ID NO: 3600 - DNA, 23 bp, Artificial Sequence
  HLA-A targeting gRNA
actccacgaacgtgccctccagg

SEQ ID NO: 3601 - DNA, 23 bp, Artificial Sequence
  HLA-A targeting gRNA
actccacgcacagaccctccagg

SEQ ID NO: 3602 - DNA, 23 bp, Artificial Sequence
  HLA-A targeting gRNA
actccacgcacaggccctcccgg

SEQ ID NO: 3603 - DNA, 23 bp, Artificial Sequence
  HLA-A targeting gRNA
actccacgcacgtgcccaccagg

SEQ ID NO: 3604 - DNA, 23 bp, Artificial Sequence
  HLA-A targeting gRNA
actccacgcacgtgtcctccagg

SEQ ID NO: 3605 - DNA, 23 bp, Artificial Sequence
  HLA-A targeting gRNA
actccacgcacgttccctccagg

SEQ ID NO: 3606 - DNA, 23 bp, Artificial Sequence
  HLA-A targeting gRNA
actccacgcactcgccctccagg

SEQ ID NO: 3607 - DNA, 23 bp, Artificial Sequence
  HLA-A targeting gRNA
actccacgcacttgccctccagg

SEQ ID NO: 3608 - DNA, 23 bp, Artificial Sequence
  HLA-A targeting gRNA
actccacgcgcgtgccctccagg

SEQ ID NO: 3609 - DNA, 23 bp, Artificial Sequence
  HLA-A targeting gRNA
actccacgtacgtgccctccagg

SEQ ID NO: 3610 - DNA, 23 bp, Artificial Sequence
  HLA-A targeting gRNA
actccactcacgtgccctccagg

SEQ ID NO: 3611 - DNA, 23 bp, Artificial Sequence
  HLA-A targeting gRNA
actccatgcacgtgccctccagg

SEQ ID NO: 3612 - DNA, 23 bp, Artificial Sequence
  HLA-A targeting gRNA
actcctcatattatgctaacagg

SEQ ID NO: 3613 - DNA, 23 bp, Artificial Sequence
  HLA-A targeting gRNA
actcctccctgtcccctcacagg

SEQ ID NO: 3614 - DNA, 23 bp, Artificial Sequence
  HLA-A targeting gRNA
actcctcgcacaggccctccagg

SEQ ID NO: 3615 - DNA, 23 bp, Artificial Sequence
  HLA-A targeting gRNA
actcgaaacgtcccaatcaaagg

SEQ ID NO: 3616 - DNA, 23 bp, Artificial Sequence
  HLA-A targeting gRNA
actcgaactttccaatgaatagg

SEQ ID NO: 3617 - DNA, 23 bp, Artificial Sequence
  HLA-A targeting gRNA
actctcaggctgcgtgtaagtgg

SEQ ID NO: 3618 - DNA, 23 bp, Artificial Sequence
  HLA-A targeting gRNA
actctcctcctgctgctctcggg

SEQ ID NO: 3619 - DNA, 23 bp, Artificial Sequence
  HLA-A targeting gRNA
actgacctggcagtgggatgggg

SEQ ID NO: 3620 - DNA, 23 bp, Artificial Sequence
  HLA-A targeting gRNA
actgatcatacccgcggaggagg

SEQ ID NO: 3621 - DNA, 23 bp, Artificial Sequence
  HLA-A targeting gRNA
actgatctggcagtgggatgggg

SEQ ID NO: 3622 - DNA, 23 bp, Artificial Sequence
  HLA-A targeting gRNA
actggacatacccgcggaggagg

SEQ ID NO: 3623 - DNA, 23 bp, Artificial Sequence
  HLA-A targeting gRNA
actggccatacccgcggaggagg

SEQ ID NO: 3624 - DNA, 23 bp, Artificial Sequence
  HLA-A targeting gRNA
actgggctgaccacgggggcggg

SEQ ID NO: 3625 - DNA, 23 bp, Artificial Sequence
  HLA-A targeting gRNA
actgggctgaccgcgagggctgg

SEQ ID NO: 3626 - DNA, 23 bp, Artificial Sequence
  HLA-A targeting gRNA
actgggctgaccgcggggccggg

SEQ ID NO: 3627 - DNA, 23 bp, Artificial Sequence
  HLA-A targeting gRNA
actgggctgaccgcgggggcggg

SEQ ID NO: 3628 - DNA, 23 bp, Artificial Sequence
  HLA-A targeting gRNA
actggggaggcgccgcgttgagg

SEQ ID NO: 3629 - DNA, 23 bp, Artificial Sequence
  HLA-A targeting gRNA
actggggaggcgccgcgttgggg

SEQ ID NO: 3630 - DNA, 23 bp, Artificial Sequence
  HLA-A targeting gRNA
actggggctctctccggccgagg

SEQ ID NO: 3631 - DNA, 23 bp, Artificial Sequence
  HLA-A targeting gRNA
actggggctctctccggtcgagg

SEQ ID NO: 3632 - DNA, 23 bp, Artificial Sequence
  HLA-A targeting gRNA
actggtcatacccgcggaggagg

SEQ ID NO: 3633 - DNA, 23 bp, Artificial Sequence
  HLA-A targeting gRNA
actggtcatgcccgcggaggagg

SEQ ID NO: 3634 - DNA, 23 bp, Artificial Sequence
  HLA-A targeting gRNA
actggttatacccgcggaggagg

SEQ ID NO: 3635 - DNA, 23 bp, Artificial Sequence
  HLA-A targeting gRNA
actggttatacccgtggaggagg

SEQ ID NO: 3636 - DNA, 23 bp, Artificial Sequence
  HLA-A targeting gRNA
actggttatgcccacggaggagg

SEQ ID NO: 3637 - DNA, 23 bp, Artificial Sequence
  HLA-A targeting gRNA
actggttatgcccgcggaggagg

SEQ ID NO: 3638 - DNA, 23 bp, Artificial Sequence
  HLA-A targeting gRNA
acttcatggagtgggagcctggg

SEQ ID NO: 3639 - DNA, 23 bp, Artificial Sequence
  HLA-A targeting gRNA
acttcatggagtgggaggctggg

SEQ ID NO: 3640 - DNA, 23 bp, Artificial Sequence
  HLA-A targeting gRNA
acttctgctcccgatctgagtgg

SEQ ID NO: 3641 - DNA, 23 bp, Artificial Sequence
  HLA-A targeting gRNA
acttctgctcctgatctaagtgg

SEQ ID NO: 3642 - DNA, 23 bp, Artificial Sequence
  HLA-A targeting gRNA
acttctgctcctgatctgagtgg

SEQ ID NO: 3643 - DNA, 23 bp, Artificial Sequence
  HLA-A targeting gRNA
acttctgttcctgatctgagtgg

SEQ ID NO: 3644 - DNA, 23 bp, Artificial Sequence
  HLA-A targeting gRNA
acttcttctcccaacttgtgggg

SEQ ID NO: 3645 - DNA, 23 bp, Artificial Sequence
  HLA-A targeting gRNA
acttgtaaaggtgagattctggg

SEQ ID NO: 3646 - DNA, 23 bp, Artificial Sequence
  HLA-A targeting gRNA
acttgtggggtccttcttccagg

SEQ ID NO: 3647 - DNA, 23 bp, Artificial Sequence
  HLA-A targeting gRNA
actttacctccactcagatcagg

SEQ ID NO: 3648 - DNA, 23 bp, Artificial Sequence
  HLA-A targeting gRNA
actttacctccactcagatcggg

SEQ ID NO: 3649 - DNA, 23 bp, Artificial Sequence
  HLA-A targeting gRNA
actttacctccacttagatcagg

SEQ ID NO: 3650 - DNA, 23 bp, Artificial Sequence
  HLA-A targeting gRNA
actttacctctactcagatcagg

SEQ ID NO: 3651 - DNA, 23 bp, Artificial Sequence
  HLA-A targeting gRNA
agaacaaggcctgagaggaaagg

SEQ ID NO: 3652 - DNA, 23 bp, Artificial Sequence
  HLA-A targeting gRNA
agaacctggccccgcccccgtgg

SEQ ID NO: 3653 - DNA, 23 bp, Artificial Sequence
  HLA-A targeting gRNA
agaacctggccccggccccgcgg

SEQ ID NO: 3654 - DNA, 23 bp, Artificial Sequence
  HLA-A targeting gRNA
agaacgaggacctgcgctcctgg

SEQ ID NO: 3655 - DNA, 23 bp, Artificial Sequence
  HLA-A targeting gRNA
agaactacgactgcagacccagg

SEQ ID NO: 3656 - DNA, 23 bp, Artificial Sequence
  HLA-A targeting gRNA
agaactatgactgcagacccagg

SEQ ID NO: 3657 - DNA, 23 bp, Artificial Sequence
  HLA-A targeting gRNA
agaagccaatcagcgtcgccggg

SEQ ID NO: 3658 - DNA, 23 bp, Artificial Sequence
  HLA-A targeting gRNA
agaagccaatcagtgtcgccggg

SEQ ID NO: 3659 - DNA, 23 bp, Artificial Sequence
  HLA-A targeting gRNA
agaaggacccgacacaagttggg

SEQ ID NO: 3660 - DNA, 23 bp, Artificial Sequence
  HLA-A targeting gRNA
agaaggacccgacacaggttggg

SEQ ID NO: 3661 - DNA, 23 bp, Artificial Sequence
  HLA-A targeting gRNA
agaaggacccgacataggttggg

SEQ ID NO: 3662 - DNA, 23 bp, Artificial Sequence
  HLA-A targeting gRNA
agaaggacccgacgcaggttggg

SEQ ID NO: 3663 - DNA, 23 bp, Artificial Sequence
  HLA-A targeting gRNA
agaaggacccgtcgcaggttggg

SEQ ID NO: 3664 - DNA, 23 bp, Artificial Sequence
  HLA-A targeting gRNA
agaaggaggggccggagtattgg

SEQ ID NO: 3665 - DNA, 23 bp, Artificial Sequence
  HLA-A targeting gRNA
agaagtatgactacagacccagg

SEQ ID NO: 3666 - DNA, 23 bp, Artificial Sequence
  HLA-A targeting gRNA
agaagtcccaggtcccgggcggg

SEQ ID NO: 3667 - DNA, 23 bp, Artificial Sequence
  HLA-A targeting gRNA
agaagtgaaactcagggaagtgg

SEQ ID NO: 3668 - DNA, 23 bp, Artificial Sequence
  HLA-A targeting gRNA
agaagtgaaactcaggggagtgg

SEQ ID NO: 3669 - DNA, 23 bp, Artificial Sequence
  HLA-A targeting gRNA
agaagtgaaactcgtgggagtgg

SEQ ID NO: 3670 - DNA, 23 bp, Artificial Sequence
  HLA-A targeting gRNA
agaagtgaaactcttgggagtgg

SEQ ID NO: 3671 - DNA, 23 bp, Artificial Sequence
  HLA-A targeting gRNA
agacaccgagatgcgggtcacgg

SEQ ID NO: 3672 - DNA, 23 bp, Artificial Sequence
  HLA-A targeting gRNA
agacactgagagccccgtccggg

SEQ ID NO: 3673 - DNA, 23 bp, Artificial Sequence
  HLA-A targeting gRNA
agacactttgcatctctcttggg

SEQ ID NO: 3674 - DNA, 23 bp, Artificial Sequence
  HLA-A targeting gRNA
agacagaaccttccagaagtggg

SEQ ID NO: 3675 - DNA, 23 bp, Artificial Sequence
  HLA-A targeting gRNA
agacccagagagccccgcccggg

SEQ ID NO: 3676 - DNA, 23 bp, Artificial Sequence
  HLA-A targeting gRNA
agacccctgatcagtattccagg

SEQ ID NO: 3677 - DNA, 23 bp, Artificial Sequence
  HLA-A targeting gRNA
agaccctgagaaccccgcccggg

SEQ ID NO: 3678 - DNA, 23 bp, Artificial Sequence
  HLA-A targeting gRNA
agaccctgagagccccgcccggg

SEQ ID NO: 3679 - DNA, 23 bp, Artificial Sequence
  HLA-A targeting gRNA
agaccctgagagccccgtccggg

SEQ ID NO: 3680 - DNA, 23 bp, Artificial Sequence
  HLA-A targeting gRNA
agaccctggcccagccctcgcgg

SEQ ID NO: 3681 - DNA, 23 bp, Artificial Sequence
  HLA-A targeting gRNA
agaccctggcccaggccccgcgg

SEQ ID NO: 3682 - DNA, 23 bp, Artificial Sequence
  HLA-A targeting gRNA
agaccctggccccgcccccgcgg

SEQ ID NO: 3683 - DNA, 23 bp, Artificial Sequence
  HLA-A targeting gRNA
agaccctggccccgcccccgtgg

SEQ ID NO: 3684 - DNA, 23 bp, Artificial Sequence
  HLA-A targeting gRNA
agaccctggccccggccccgcgg

SEQ ID NO: 3685 - DNA, 23 bp, Artificial Sequence
  HLA-A targeting gRNA
agaccctggcctaggccccgcgg

SEQ ID NO: 3686 - DNA, 23 bp, Artificial Sequence
  HLA-A targeting gRNA
agacctggaccggtgagtgcggg

SEQ ID NO: 3687 - DNA, 23 bp, Artificial Sequence
  HLA-A targeting gRNA
agacctgggccggtgagtgcggg

SEQ ID NO: 3688 - DNA, 23 bp, Artificial Sequence
  HLA-A targeting gRNA
agacctgggcctgtgagtgcggg

SEQ ID NO: 3689 - DNA, 23 bp, Artificial Sequence
  HLA-A targeting gRNA
agacctgggctggtgagtgcggg

SEQ ID NO: 3690 - DNA, 23 bp, Artificial Sequence
  HLA-A targeting gRNA
agacgaagcggggctctccgcgg

SEQ ID NO: 3691 - DNA, 23 bp, Artificial Sequence
  HLA-A targeting gRNA
agacgccaagatgctggtcatgg

SEQ ID NO: 3692 - DNA, 23 bp, Artificial Sequence
  HLA-A targeting gRNA
agacgccgagatgcgggtcacgg

SEQ ID NO: 3693 - DNA, 23 bp, Artificial Sequence
  HLA-A targeting gRNA
agacgccgagatgcgggtcatgg

SEQ ID NO: 3694 - DNA, 23 bp, Artificial Sequence
  HLA-A targeting gRNA
agacgccgagatgctggtcatgg

SEQ ID NO: 3695 - DNA, 23 bp, Artificial Sequence
  HLA-A targeting gRNA
agacggatgtatcaccttaatgg

SEQ ID NO: 3696 - DNA, 23 bp, Artificial Sequence
  HLA-A targeting gRNA
agacggctccgggaaaggaaggg

SEQ ID NO: 3697 - DNA, 23 bp, Artificial Sequence
  HLA-A targeting gRNA
agacggctctgggaaaggaaggg

SEQ ID NO: 3698 - DNA, 23 bp, Artificial Sequence
  HLA-A targeting gRNA
agacggctctgggaaaggagggg

SEQ ID NO: 3699 - DNA, 23 bp, Artificial Sequence
  HLA-A targeting gRNA
agactgaccgaatgaacctgcgg

SEQ ID NO: 3700 - DNA, 23 bp, Artificial Sequence
  HLA-A targeting gRNA
agactgaccgagaggacctgcgg

SEQ ID NO: 3701 - DNA, 23 bp, Artificial Sequence
  HLA-A targeting gRNA
agactgaccgagtgaacctgcgg

SEQ ID NO: 3702 - DNA, 23 bp, Artificial Sequence
  HLA-A targeting gRNA
agactgaccgagtgagcctgcgg

SEQ ID NO: 3703 - DNA, 23 bp, Artificial Sequence
  HLA-A targeting gRNA
agactgaccgagtgggcctgcgg

SEQ ID NO: 3704 - DNA, 23 bp, Artificial Sequence
  HLA-A targeting gRNA
agactgacggagagagcctgcgg

SEQ ID NO: 3705 - DNA, 23 bp, Artificial Sequence
  HLA-A targeting gRNA
agacttaacgagagagcctgcgg

SEQ ID NO: 3706 - DNA, 23 bp, Artificial Sequence
  HLA-A targeting gRNA
agacttaccgagagaacctgagg

SEQ ID NO: 3707 - DNA, 23 bp, Artificial Sequence
  HLA-A targeting gRNA
agacttaccgagagaacctgcgg

SEQ ID NO: 3708 - DNA, 23 bp, Artificial Sequence
  HLA-A targeting gRNA
agacttaccgagagagcctgcgg

SEQ ID NO: 3709 - DNA, 23 bp, Artificial Sequence
  HLA-A targeting gRNA
agacttaccgagaggacctgcgg

SEQ ID NO: 3710 - DNA, 23 bp, Artificial Sequence
  HLA-A targeting gRNA
agagaaagcagaagtccttctgg

SEQ ID NO: 3711 - DNA, 23 bp, Artificial Sequence
  HLA-A targeting gRNA
agagaacccagacgccagcctgg

SEQ ID NO: 3712 - DNA, 23 bp, Artificial Sequence
  HLA-A targeting gRNA
agagaagagggggccctcagagg

SEQ ID NO: 3713 - DNA, 23 bp, Artificial Sequence
  HLA-A targeting gRNA
agagagccccgcccgggacctgg

SEQ ID NO: 3714 - DNA, 23 bp, Artificial Sequence
  HLA-A targeting gRNA
agagaggggaccgcaggcggggg

SEQ ID NO: 3715 - DNA, 23 bp, Artificial Sequence
  HLA-A targeting gRNA
agagcaccgcttcatctcagtgg

SEQ ID NO: 3716 - DNA, 23 bp, Artificial Sequence
  HLA-A targeting gRNA
agagcagacggggccctcagagg

SEQ ID NO: 3717 - DNA, 23 bp, Artificial Sequence
  HLA-A targeting gRNA
agagcagagatacacatgccagg

SEQ ID NO: 3718 - DNA, 23 bp, Artificial Sequence
  HLA-A targeting gRNA
agagcagagggggccctcagagg

SEQ ID NO: 3719 - DNA, 23 bp, Artificial Sequence
  HLA-A targeting gRNA
agagcagcaggaggacggttcgg

SEQ ID NO: 3720 - DNA, 23 bp, Artificial Sequence
  HLA-A targeting gRNA
agagcagcaggaggagagttcgg

SEQ ID NO: 3721 - DNA, 23 bp, Artificial Sequence
  HLA-A targeting gRNA
agagcagcaggaggagggctcgg

SEQ ID NO: 3722 - DNA, 23 bp, Artificial Sequence
  HLA-A targeting gRNA
agagcagcaggaggagggcttgg

SEQ ID NO: 3723 - DNA, 23 bp, Artificial Sequence
  HLA-A targeting gRNA
agagcagcaggaggagggttcgg

SEQ ID NO: 3724 - DNA, 23 bp, Artificial Sequence
  HLA-A targeting gRNA
agagcagcaggatgagggttcgg

SEQ ID NO: 3725 - DNA, 23 bp, Artificial Sequence
  HLA-A targeting gRNA
agagccccaaacactgagtgtgg

SEQ ID NO: 3726 - DNA, 23 bp, Artificial Sequence
  HLA-A targeting gRNA
agagccccacttcatcgcagtgg

SEQ ID NO: 3727 - DNA, 23 bp, Artificial Sequence
  HLA-A targeting gRNA
agagccccgcttcatctcagtgg

SEQ ID NO: 3728 - DNA, 23 bp, Artificial Sequence
  HLA-A targeting gRNA
agagccccgcttcgtctcagtgg

SEQ ID NO: 3729 - DNA, 23 bp, Artificial Sequence
  HLA-A targeting gRNA
agagcccctcaccctgagatggg

SEQ ID NO: 3730 - DNA, 23 bp, Artificial Sequence
  HLA-A targeting gRNA
agagcccctcaccctgagctggg

SEQ ID NO: 3731 - DNA, 23 bp, Artificial Sequence
  HLA-A targeting gRNA
agagccctgggcactgtcgctgg

SEQ ID NO: 3732 - DNA, 23 bp, Artificial Sequence
  HLA-A targeting gRNA
agagccctgggcactgttgctgg

SEQ ID NO: 3733 - DNA, 23 bp, Artificial Sequence
  HLA-A targeting gRNA
agagctcaggtggaaaaggaggg

SEQ ID NO: 3734 - DNA, 23 bp, Artificial Sequence
  HLA-A targeting gRNA
agaggaacgaggtgcccgcccgg

SEQ ID NO: 3735 - DNA, 23 bp, Artificial Sequence
  HLA-A targeting gRNA
agaggagccgcgggcgccgtggg

SEQ ID NO: 3736 - DNA, 23 bp, Artificial Sequence
  HLA-A targeting gRNA
agaggagcgaggggcccgcccgg

SEQ ID NO: 3737 - DNA, 23 bp, Artificial Sequence
  HLA-A targeting gRNA
agaggagcgaggggccctcccgg

SEQ ID NO: 3738 - DNA, 23 bp, Artificial Sequence
  HLA-A targeting gRNA
agaggagggaggggccctcccgg

SEQ ID NO: 3739 - DNA, 23 bp, Artificial Sequence
  HLA-A targeting gRNA
agaggcccttgaagtcacaaagg

SEQ ID NO: 3740 - DNA, 23 bp, Artificial Sequence
  HLA-A targeting gRNA
agaggccgagatgcgggtcatgg

SEQ ID NO: 3741 - DNA, 23 bp, Artificial Sequence
  HLA-A targeting gRNA
agaggctcttgaagtcacaaagg

SEQ ID NO: 3742 - DNA, 23 bp, Artificial Sequence
  HLA-A targeting gRNA
agagtaagtgctagcacacaggg

SEQ ID NO: 3743 - DNA, 23 bp, Artificial Sequence
  HLA-A targeting gRNA
agagtaagttctggcacacaggg

SEQ ID NO: 3744 - DNA, 23 bp, Artificial Sequence
  HLA-A targeting gRNA
agagtcccgcttcatctcagtgg

SEQ ID NO: 3745 - DNA, 23 bp, Artificial Sequence
  HLA-A targeting gRNA
agagtgggcaggggggtggtggg

SEQ ID NO: 3746 - DNA, 23 bp, Artificial Sequence
  HLA-A targeting gRNA
agagtgggcggggggggggtggg

SEQ ID NO: 3747 - DNA, 23 bp, Artificial Sequence
  HLA-A targeting gRNA
agagtgggcgggggggggtgggg

SEQ ID NO: 3748 - DNA, 23 bp, Artificial Sequence
  HLA-A targeting gRNA
agagtgggcggggggggtggtgg

SEQ ID NO: 3749 - DNA, 23 bp, Artificial Sequence
  HLA-A targeting gRNA
agagtgtgagaccctggccccgg

SEQ ID NO: 3750 - DNA, 23 bp, Artificial Sequence
  HLA-A targeting gRNA
agatagaaccttccagaagtggg

SEQ ID NO: 3751 - DNA, 23 bp, Artificial Sequence
  HLA-A targeting gRNA
agatcacactgacctggcagtgg

SEQ ID NO: 3752 - DNA, 23 bp, Artificial Sequence
  HLA-A targeting gRNA
agatcacactgacctggtagcgg

SEQ ID NO: 3753 - DNA, 23 bp, Artificial Sequence
  HLA-A targeting gRNA
agatcacactgatctggcagtgg

SEQ ID NO: 3754 - DNA, 23 bp, Artificial Sequence
  HLA-A targeting gRNA
agatcagtgtgatctccgcaggg

SEQ ID NO: 3755 - DNA, 23 bp, Artificial Sequence
  HLA-A targeting gRNA
agatccgcccccgaggccgcggg

SEQ ID NO: 3756 - DNA, 23 bp, Artificial Sequence
  HLA-A targeting gRNA
agatccgccccctgaggccgcgg

SEQ ID NO: 3757 - DNA, 23 bp, Artificial Sequence
  HLA-A targeting gRNA
agatctacaggagatagggaagg

SEQ ID NO: 3758 - DNA, 23 bp, Artificial Sequence
  HLA-A targeting gRNA
agatctacaggagatggggaagg

SEQ ID NO: 3759 - DNA, 23 bp, Artificial Sequence
  HLA-A targeting gRNA
agatctacgggagatggggaagg

SEQ ID NO: 3760 - DNA, 23 bp, Artificial Sequence
  HLA-A targeting gRNA
agatctataggagatggggaagg

SEQ ID NO: 3761 - DNA, 23 bp, Artificial Sequence
  HLA-A targeting gRNA
agatgaagcgggactctccgcgg

SEQ ID NO: 3762 - DNA, 23 bp, Artificial Sequence
  HLA-A targeting gRNA
agatgaagcggggctccccgcgg

SEQ ID NO: 3763 - DNA, 23 bp, Artificial Sequence
  HLA-A targeting gRNA
agatgaagcggggctctccgcgg

SEQ ID NO: 3764 - DNA, 23 bp, Artificial Sequence
  HLA-A targeting gRNA
agatgaagcggtgctctccgcgg

SEQ ID NO: 3765 - DNA, 23 bp, Artificial Sequence
  HLA-A targeting gRNA
agatggaaccttccagaagtggg

SEQ ID NO: 3766 - DNA, 23 bp, Artificial Sequence
  HLA-A targeting gRNA
agatggccctgggaaaggagggg

SEQ ID NO: 3767 - DNA, 23 bp, Artificial Sequence
  HLA-A targeting gRNA
agatggctctgggaaaggagggg

SEQ ID NO: 3768 - DNA, 23 bp, Artificial Sequence
  HLA-A targeting gRNA
agattacatcgccctgaacgagg

SEQ ID NO: 3769 - DNA, 23 bp, Artificial Sequence
  HLA-A targeting gRNA
agattcttggggtctagagtggg

SEQ ID NO: 3770 - DNA, 23 bp, Artificial Sequence
  HLA-A targeting gRNA
agcaagaggggccggagtattgg

SEQ ID NO: 3771 - DNA, 23 bp, Artificial Sequence
  HLA-A targeting gRNA
agcaaggggaccgcaggcggggg

SEQ ID NO: 3772 - DNA, 23 bp, Artificial Sequence
  HLA-A targeting gRNA
agcacacagggtcccaggctggg

SEQ ID NO: 3773 - DNA, 23 bp, Artificial Sequence
  HLA-A targeting gRNA
agcacagggcccagcacctcagg

SEQ ID NO: 3774 - DNA, 23 bp, Artificial Sequence
  HLA-A targeting gRNA
agcacctcagggtgacctcatgg

SEQ ID NO: 3775 - DNA, 23 bp, Artificial Sequence
  HLA-A targeting gRNA
agcagcaggaggacggttcgggg

SEQ ID NO: 3776 - DNA, 23 bp, Artificial Sequence
  HLA-A targeting gRNA
agcagcaggaggagagttcgggg

SEQ ID NO: 3777 - DNA, 23 bp, Artificial Sequence
  HLA-A targeting gRNA
agcagcaggaggagggctcgggg

SEQ ID NO: 3778 - DNA, 23 bp, Artificial Sequence
  HLA-A targeting gRNA
agcagcaggaggagggcttgggg

SEQ ID NO: 3779 - DNA, 23 bp, Artificial Sequence
  HLA-A targeting gRNA
agcagcaggaggagggttcgggg

SEQ ID NO: 3780 - DNA, 23 bp, Artificial Sequence
  HLA-A targeting gRNA
agcagcaggatgagggttcaggg

SEQ ID NO: 3781 - DNA, 23 bp, Artificial Sequence
  HLA-A targeting gRNA
agcagcaggatgagggttcgggg

SEQ ID NO: 3782 - DNA, 23 bp, Artificial Sequence
  HLA-A targeting gRNA
agcaggaggggccagagtattgg

SEQ ID NO: 3783 - DNA, 23 bp, Artificial Sequence
  HLA-A targeting gRNA
agcaggaggggccggaatattgg

SEQ ID NO: 3784 - DNA, 23 bp, Artificial Sequence
  HLA-A targeting gRNA
agcaggaggggccggagcattgg

SEQ ID NO: 3785 - DNA, 23 bp, Artificial Sequence
  HLA-A targeting gRNA
agcaggaggggccggagtactgg

SEQ ID NO: 3786 - DNA, 23 bp, Artificial Sequence
  HLA-A targeting gRNA
agcaggaggggccggagtgttgg

SEQ ID NO: 3787 - DNA, 23 bp, Artificial Sequence
  HLA-A targeting gRNA
agcaggaggggctggagtattgg

SEQ ID NO: 3788 - DNA, 23 bp, Artificial Sequence
  HLA-A targeting gRNA
agcaggaggtgccggaggattgg

SEQ ID NO: 3789 - DNA, 23 bp, Artificial Sequence
  HLA-A targeting gRNA
agcatgtacggctgcgacctggg

SEQ ID NO: 3790 - DNA, 23 bp, Artificial Sequence
  HLA-A targeting gRNA
agcatgtacggctgcgacgtggg

SEQ ID NO: 3791 - DNA, 23 bp, Artificial Sequence
  HLA-A targeting gRNA
agcatgtatggctgcgacgtggg

SEQ ID NO: 3792 - DNA, 23 bp, Artificial Sequence
  HLA-A targeting gRNA
agcattcatgagtcaggggaagg

SEQ ID NO: 3793 - DNA, 23 bp, Artificial Sequence
  HLA-A targeting gRNA
agcattcatgagtcgggggaagg

SEQ ID NO: 3794 - DNA, 23 bp, Artificial Sequence
  HLA-A targeting gRNA
agcattcgtgagtcaggggaagg

SEQ ID NO: 3795 - DNA, 23 bp, Artificial Sequence
  HLA-A targeting gRNA
agccactccacaggtatctgcgg

SEQ ID NO: 3796 - DNA, 23 bp, Artificial Sequence
  HLA-A targeting gRNA
agccatggatagagcaggagggg

SEQ ID NO: 3797 - DNA, 23 bp, Artificial Sequence
  HLA-A targeting gRNA
agcccatggcccagcacctcagg

SEQ ID NO: 3798 - DNA, 23 bp, Artificial Sequence
  HLA-A targeting gRNA
agccccaaacactgagtgtgggg

SEQ ID NO: 3799 - DNA, 23 bp, Artificial Sequence
  HLA-A targeting gRNA
agcccctcctgctctatccatgg

SEQ ID NO: 3800 - DNA, 23 bp, Artificial Sequence
  HLA-A targeting gRNA
agccctcctcctgctgctctcgg

SEQ ID NO: 3801 - DNA, 23 bp, Artificial Sequence
  HLA-A targeting gRNA
agccgcctcccacttgcgctggg

SEQ ID NO: 3802 - DNA, 23 bp, Artificial Sequence
  HLA-A targeting gRNA
agccgcgcagggaggagggtcgg

SEQ ID NO: 3803 - DNA, 23 bp, Artificial Sequence
  HLA-A targeting gRNA
agccgcgcagggaggtgggtcgg

SEQ ID NO: 3804 - DNA, 23 bp, Artificial Sequence
  HLA-A targeting gRNA
agccgcgccgggaggtgggtcgg

SEQ ID NO: 3805 - DNA, 23 bp, Artificial Sequence
  HLA-A targeting gRNA
agccgcgccggtaggagggtcgg

SEQ ID NO: 3806 - DNA, 23 bp, Artificial Sequence
  HLA-A targeting gRNA
agccgtggatggagcaggagggg

SEQ ID NO: 3807 - DNA, 23 bp, Artificial Sequence
  HLA-A targeting gRNA
agccgtgggtggagcaggagggg

SEQ ID NO: 3808 - DNA, 23 bp, Artificial Sequence
  HLA-A targeting gRNA
agcgaccccgcgagtccgagagg

SEQ ID NO: 3809 - DNA, 23 bp, Artificial Sequence
  HLA-A targeting gRNA
agcgacgccgcaagtccgagagg

SEQ ID NO: 3810 - DNA, 23 bp, Artificial Sequence
  HLA-A targeting gRNA
agcgacgccgcgagtccaagagg

SEQ ID NO: 3811 - DNA, 23 bp, Artificial Sequence
  HLA-A targeting gRNA
agcgacgccgcgagtccgagagg

SEQ ID NO: 3812 - DNA, 23 bp, Artificial Sequence
  HLA-A targeting gRNA
agcgacgccgcgagtccgagggg

SEQ ID NO: 3813 - DNA, 23 bp, Artificial Sequence
  HLA-A targeting gRNA
agcgactccgcgagtccaagagg

SEQ ID NO: 3814 - DNA, 23 bp, Artificial Sequence
  HLA-A targeting gRNA
agcgaggggaccgcaggcggggg

SEQ ID NO: 3815 - DNA, 23 bp, Artificial Sequence
  HLA-A targeting gRNA
agcgaggggcccgcccggcgagg

SEQ ID NO: 3816 - DNA, 23 bp, Artificial Sequence
  HLA-A targeting gRNA
agcgaggggccctcccggcgagg

SEQ ID NO: 3817 - DNA, 23 bp, Artificial Sequence
  HLA-A targeting gRNA
agcgcaagtgggaggcggcccgg

SEQ ID NO: 3818 - DNA, 23 bp, Artificial Sequence
  HLA-A targeting gRNA
agcgcgggtaccaggggcagtgg

SEQ ID NO: 3819 - DNA, 23 bp, Artificial Sequence
  HLA-A targeting gRNA
agcggcctctgcggagaggaggg

SEQ ID NO: 3820 - DNA, 23 bp, Artificial Sequence
  HLA-A targeting gRNA
agcggcgcagggaggagggtcgg

SEQ ID NO: 3821 - DNA, 23 bp, Artificial Sequence
  HLA-A targeting gRNA
agcggcgcagggaggtgggtcgg

SEQ ID NO: 3822 - DNA, 23 bp, Artificial Sequence
  HLA-A targeting gRNA
agcggtgtagaaatacctcatgg

SEQ ID NO: 3823 - DNA, 23 bp, Artificial Sequence
  HLA-A targeting gRNA
agcggtgtagaaatacttcatgg

SEQ ID NO: 3824 - DNA, 23 bp, Artificial Sequence
  HLA-A targeting gRNA
agctacgccgcgagtccaagagg

SEQ ID NO: 3825 - DNA, 23 bp, Artificial Sequence
  HLA-A targeting gRNA
agctcaggtagggaaggggtggg

SEQ ID NO: 3826 - DNA, 23 bp, Artificial Sequence
  HLA-A targeting gRNA
agctgaagtggtcgggggtgggg

SEQ ID NO: 3827 - DNA, 23 bp, Artificial Sequence
  HLA-A targeting gRNA
agctgaagtggtctggggtgggg

SEQ ID NO: 3828 - DNA, 23 bp, Artificial Sequence
  HLA-A targeting gRNA
agctgccgcagtggtcaaagtgg

SEQ ID NO: 3829 - DNA, 23 bp, Artificial Sequence
  HLA-A targeting gRNA
agctgccgcagtggtcgaagtgg

SEQ ID NO: 3830 - DNA, 23 bp, Artificial Sequence
  HLA-A targeting gRNA
agctgctgcagtggtcaaagtgg

SEQ ID NO: 3831 - DNA, 23 bp, Artificial Sequence
  HLA-A targeting gRNA
agctggagcgcgctggtaccagg

SEQ ID NO: 3832 - DNA, 23 bp, Artificial Sequence
  HLA-A targeting gRNA
agctggggtaaggaggggaatgg

SEQ ID NO: 3833 - DNA, 23 bp, Artificial Sequence
  HLA-A targeting gRNA
agctgtcctaggagctatggtgg

SEQ ID NO: 3834 - DNA, 23 bp, Artificial Sequence
  HLA-A targeting gRNA
agctgtcctaggagctgtgatgg

SEQ ID NO: 3835 - DNA, 23 bp, Artificial Sequence
  HLA-A targeting gRNA
agctgtcctaggagctgtggtgg

SEQ ID NO: 3836 - DNA, 23 bp, Artificial Sequence
  HLA-A targeting gRNA
agcttgtacggctgcgacgtggg

SEQ ID NO: 3837 - DNA, 23 bp, Artificial Sequence
  HLA-A targeting gRNA
aggaaaagtcacggtgcccaagg

SEQ ID NO: 3838 - DNA, 23 bp, Artificial Sequence
  HLA-A targeting gRNA
aggaaaagtcacggttcccaagg

SEQ ID NO: 3839 - DNA, 23 bp, Artificial Sequence
  HLA-A targeting gRNA
aggaaaagtcatggttcccaagg

SEQ ID NO: 3840 - DNA, 23 bp, Artificial Sequence
  HLA-A targeting gRNA
aggaaagcaagtgtgggtcctgg

SEQ ID NO: 3841 - DNA, 23 bp, Artificial Sequence
  HLA-A targeting gRNA
aggaaaggtcacggttcccaagg

SEQ ID NO: 3842 - DNA, 23 bp, Artificial Sequence
  HLA-A targeting gRNA
aggaacgcagatcctcgttcagg

SEQ ID NO: 3843 - DNA, 23 bp, Artificial Sequence
  HLA-A targeting gRNA
aggaagagctcaggtagggaagg

SEQ ID NO: 3844 - DNA, 23 bp, Artificial Sequence
  HLA-A targeting gRNA
aggaagagctcaggtggaaaagg

SEQ ID NO: 3845 - DNA, 23 bp, Artificial Sequence
  HLA-A targeting gRNA
aggaagagttcaggtagggaagg

SEQ ID NO: 3846 - DNA, 23 bp, Artificial Sequence
  HLA-A targeting gRNA
aggaagagttctggtagggaagg

SEQ ID NO: 3847 - DNA, 23 bp, Artificial Sequence
  HLA-A targeting gRNA
aggacacctggggtagggaaggg

SEQ ID NO: 3848 - DNA, 23 bp, Artificial Sequence
  HLA-A targeting gRNA
aggacacctggggtggggaaggg

SEQ ID NO: 3849 - DNA, 23 bp, Artificial Sequence
  HLA-A targeting gRNA
aggacacctggtgtggggaaggg

SEQ ID NO: 3850 - DNA, 23 bp, Artificial Sequence
  HLA-A targeting gRNA
aggacccgggaagccgcgcaggg

SEQ ID NO: 3851 - DNA, 23 bp, Artificial Sequence
  HLA-A targeting gRNA
aggacccggggagccgcgcaggg

SEQ ID NO: 3852 - DNA, 23 bp, Artificial Sequence
  HLA-A targeting gRNA
aggacccggggagccgcgccggg

SEQ ID NO: 3853 - DNA, 23 bp, Artificial Sequence
  HLA-A targeting gRNA
aggacccggggagcggcgcaggg

SEQ ID NO: 3854 - DNA, 23 bp, Artificial Sequence
  HLA-A targeting gRNA
aggacctgaggagccgcgccggg

SEQ ID NO: 3855 - DNA, 23 bp, Artificial Sequence
  HLA-A targeting gRNA
aggacctgcgctcctggacgcgg

SEQ ID NO: 3856 - DNA, 23 bp, Artificial Sequence
  HLA-A targeting gRNA
aggacctggtcagagcccacagg

SEQ ID NO: 3857 - DNA, 23 bp, Artificial Sequence
  HLA-A targeting gRNA
aggacctggtcagagcccgcagg

SEQ ID NO: 3858 - DNA, 23 bp, Artificial Sequence
  HLA-A targeting gRNA
aggacctggtcagagccctcagg

SEQ ID NO: 3859 - DNA, 23 bp, Artificial Sequence
  HLA-A targeting gRNA
aggacgaagtcccaggccccggg

SEQ ID NO: 3860 - DNA, 23 bp, Artificial Sequence
  HLA-A targeting gRNA
aggacgaagtcccaggtcccggg

SEQ ID NO: 3861 - DNA, 23 bp, Artificial Sequence
  HLA-A targeting gRNA
aggagacccgggccgtacgtcgg

SEQ ID NO: 3862 - DNA, 23 bp, Artificial Sequence
  HLA-A targeting gRNA
aggagactctgagtccgggtggg

SEQ ID NO: 3863 - DNA, 23 bp, Artificial Sequence
  HLA-A targeting gRNA
aggagagaggggaccgcaggcgg

SEQ ID NO: 3864 - DNA, 23 bp, Artificial Sequence
  HLA-A targeting gRNA
aggagattctgagtccgggtggg

SEQ ID NO: 3865 - DNA, 23 bp, Artificial Sequence
  HLA-A targeting gRNA
aggagattttgagtccgggtggg

SEQ ID NO: 3866 - DNA, 23 bp, Artificial Sequence
  HLA-A targeting gRNA
aggagcaaggggaccgcaggcgg

SEQ ID NO: 3867 - DNA, 23 bp, Artificial Sequence
  HLA-A targeting gRNA
aggagccctgcaccctgagatgg

SEQ ID NO: 3868 - DNA, 23 bp, Artificial Sequence
  HLA-A targeting gRNA
aggagcccttcagcagggtcagg

SEQ ID NO: 3869 - DNA, 23 bp, Artificial Sequence
  HLA-A targeting gRNA
aggagcgaggggaccgcaggcgg

SEQ ID NO: 3870 - DNA, 23 bp, Artificial Sequence
  HLA-A targeting gRNA
aggagcgcagatcctcgttcagg

SEQ ID NO: 3871 - DNA, 23 bp, Artificial Sequence
  HLA-A targeting gRNA
aggagcgcaggtcctcattcagg

SEQ ID NO: 3872 - DNA, 23 bp, Artificial Sequence
  HLA-A targeting gRNA
aggagcgcaggtcctcgtccagg

SEQ ID NO: 3873 - DNA, 23 bp, Artificial Sequence
  HLA-A targeting gRNA
aggagcgcaggtcctcgttctgg

SEQ ID NO: 3874 - DNA, 23 bp, Artificial Sequence
  HLA-A targeting gRNA
aggagctcaggtcctcgttcagg

SEQ ID NO: 3875 - DNA, 23 bp, Artificial Sequence
  HLA-A targeting gRNA
aggagcttaggtcctcgttcagg

SEQ ID NO: 3876 - DNA, 23 bp, Artificial Sequence
  HLA-A targeting gRNA
aggaggcgcccgtcgggcccagg

SEQ ID NO: 3877 - DNA, 23 bp, Artificial Sequence
  HLA-A targeting gRNA
aggaggcgcccgtcgggccccgg

SEQ ID NO: 3878 - DNA, 23 bp, Artificial Sequence
  HLA-A targeting gRNA
aggagggcaggtcctcgttcagg

SEQ ID NO: 3879 - DNA, 23 bp, Artificial Sequence
  HLA-A targeting gRNA
aggagtactggttatgcccgcgg

SEQ ID NO: 3880 - DNA, 23 bp, Artificial Sequence
  HLA-A targeting gRNA
aggatgtaaggctgcgacgtggg

SEQ ID NO: 3881 - DNA, 23 bp, Artificial Sequence
  HLA-A targeting gRNA
aggatgtacggctgcgacctggg

SEQ ID NO: 3882 - DNA, 23 bp, Artificial Sequence
  HLA-A targeting gRNA
aggatgtacggctgcgacgtggg

SEQ ID NO: 3883 - DNA, 23 bp, Artificial Sequence
  HLA-A targeting gRNA
aggatgtacggctgggacctggg

SEQ ID NO: 3884 - DNA, 23 bp, Artificial Sequence
  HLA-A targeting gRNA
aggatgtatggctgcgacctggg

SEQ ID NO: 3885 - DNA, 23 bp, Artificial Sequence
  HLA-A targeting gRNA
aggatgtctggctgcgacccggg

SEQ ID NO: 3886 - DNA, 23 bp, Artificial Sequence
  HLA-A targeting gRNA
aggatgtctggctgcgacctggg

SEQ ID NO: 3887 - DNA, 23 bp, Artificial Sequence
  HLA-A targeting gRNA
aggatgtctggctgcgacgtggg

SEQ ID NO: 3888 - DNA, 23 bp, Artificial Sequence
  HLA-A targeting gRNA
aggatgtttggctgcgacctggg

SEQ ID NO: 3889 - DNA, 23 bp, Artificial Sequence
  HLA-A targeting gRNA
aggcaaactggttatgcccgcgg

SEQ ID NO: 3890 - DNA, 23 bp, Artificial Sequence
  HLA-A targeting gRNA
aggcaggatcaggaaacacgagg

SEQ ID NO: 3891 - DNA, 23 bp, Artificial Sequence
  HLA-A targeting gRNA
aggcagggaacacttctacctgg

SEQ ID NO: 3892 - DNA, 23 bp, Artificial Sequence
  HLA-A targeting gRNA
aggcagggccatgcaatcttagg

SEQ ID NO: 3893 - DNA, 23 bp, Artificial Sequence
  HLA-A targeting gRNA
aggcagggccatgcgatcttagg

SEQ ID NO: 3894 - DNA, 23 bp, Artificial Sequence
  HLA-A targeting gRNA
aggcagggccatgtgatcttagg

SEQ ID NO: 3895 - DNA, 23 bp, Artificial Sequence
  HLA-A targeting gRNA
aggcagggccatgtgattttagg

SEQ ID NO: 3896 - DNA, 23 bp, Artificial Sequence
  HLA-A targeting gRNA
aggcatactgctcatacccgcgg

SEQ ID NO: 3897 - DNA, 23 bp, Artificial Sequence
  HLA-A targeting gRNA
aggccaaaatccccgcgggttgg

SEQ ID NO: 3898 - DNA, 23 bp, Artificial Sequence
  HLA-A targeting gRNA
aggccatcccgggagatctacgg

SEQ ID NO: 3899 - DNA, 23 bp, Artificial Sequence
  HLA-A targeting gRNA
aggccatgccgggagatctacgg

SEQ ID NO: 3900 - DNA, 23 bp, Artificial Sequence
  HLA-A targeting gRNA
aggccccgggcggggctctcagg

SEQ ID NO: 3901 - DNA, 23 bp, Artificial Sequence
  HLA-A targeting gRNA
aggcccttgaagtcacaaagggg

SEQ ID NO: 3902 - DNA, 23 bp, Artificial Sequence
  HLA-A targeting gRNA
aggccgcctcccacttgcgctgg

SEQ ID NO: 3903 - DNA, 23 bp, Artificial Sequence
  HLA-A targeting gRNA
aggcctgagaagaaaagtcatgg

SEQ ID NO: 3904 - DNA, 23 bp, Artificial Sequence
  HLA-A targeting gRNA
aggcctgagaggaaaagtcatgg

SEQ ID NO: 3905 - DNA, 23 bp, Artificial Sequence
  HLA-A targeting gRNA
aggcctgagaggaaaggtcacgg

SEQ ID NO: 3906 - DNA, 23 bp, Artificial Sequence
  HLA-A targeting gRNA
aggcgaactggtcatacccgcgg

SEQ ID NO: 3907 - DNA, 23 bp, Artificial Sequence
  HLA-A targeting gRNA
aggcgaactggtcatgcccgcgg

SEQ ID NO: 3908 - DNA, 23 bp, Artificial Sequence
  HLA-A targeting gRNA
aggcgaactggttatacccgcgg

SEQ ID NO: 3909 - DNA, 23 bp, Artificial Sequence
  HLA-A targeting gRNA
aggcgaactggttatacccgtgg

SEQ ID NO: 3910 - DNA, 23 bp, Artificial Sequence
  HLA-A targeting gRNA
aggcgaactggttatgcccgcgg

SEQ ID NO: 3911 - DNA, 23 bp, Artificial Sequence
  HLA-A targeting gRNA
aggcgacccgggccgtccgtggg

SEQ ID NO: 3912 - DNA, 23 bp, Artificial Sequence
  HLA-A targeting gRNA
aggcgctttgcatctctcatagg

SEQ ID NO: 3913 - DNA, 23 bp, Artificial Sequence
  HLA-A targeting gRNA
aggcgctttgcatctctcatggg

SEQ ID NO: 3914 - DNA, 23 bp, Artificial Sequence
  HLA-A targeting gRNA
aggcgctttgcatctttcatggg

SEQ ID NO: 3915 - DNA, 23 bp, Artificial Sequence
  HLA-A targeting gRNA
aggcggaccggtcatacccgcgg

SEQ ID NO: 3916 - DNA, 23 bp, Artificial Sequence
  HLA-A targeting gRNA
aggcggactgatcatacccgcgg

SEQ ID NO: 3917 - DNA, 23 bp, Artificial Sequence
  HLA-A targeting gRNA
aggcggactggccatacccgcgg

SEQ ID NO: 3918 - DNA, 23 bp, Artificial Sequence
  HLA-A targeting gRNA
aggcggactggtcatacccgcgg

SEQ ID NO: 3919 - DNA, 23 bp, Artificial Sequence
  HLA-A targeting gRNA
aggcggactggtcatgcccgcgg

SEQ ID NO: 3920 - DNA, 23 bp, Artificial Sequence
  HLA-A targeting gRNA
aggcggggcacacttctacctgg

SEQ ID NO: 3921 - DNA, 23 bp, Artificial Sequence
  HLA-A targeting gRNA
aggcgggggcgcaggacccgggg

SEQ ID NO: 3922 - DNA, 23 bp, Artificial Sequence
  HLA-A targeting gRNA
aggcgggggcgcaggacctgagg

SEQ ID NO: 3923 - DNA, 23 bp, Artificial Sequence
  HLA-A targeting gRNA
aggcgggggctcaggacccgggg

SEQ ID NO: 3924 - DNA, 23 bp, Artificial Sequence
  HLA-A targeting gRNA
aggcgtactggacatacccgcgg

SEQ ID NO: 3925 - DNA, 23 bp, Artificial Sequence
  HLA-A targeting gRNA
aggcgtactggtcatacccgcgg

SEQ ID NO: 3926 - DNA, 23 bp, Artificial Sequence
  HLA-A targeting gRNA
aggcgtactggtcatgcccgcgg

SEQ ID NO: 3927 - DNA, 23 bp, Artificial Sequence
  HLA-A targeting gRNA
aggcgtactggttatacccgcgg

SEQ ID NO: 3928 - DNA, 23 bp, Artificial Sequence
  HLA-A targeting gRNA
aggcgtactggttatgcccgcgg

SEQ ID NO: 3929 - DNA, 23 bp, Artificial Sequence
  HLA-A targeting gRNA
aggcgtcctggtcatacccgcgg

SEQ ID NO: 3930 - DNA, 23 bp, Artificial Sequence
  HLA-A targeting gRNA
aggcgtcctggtggtacccgcgg

SEQ ID NO: 3931 - DNA, 23 bp, Artificial Sequence
  HLA-A targeting gRNA
aggcgtcctggttatgcccgcgg

SEQ ID NO: 3932 - DNA, 23 bp, Artificial Sequence
  HLA-A targeting gRNA
aggctaactggtcatgcccgcgg

SEQ ID NO: 3933 - DNA, 23 bp, Artificial Sequence
  HLA-A targeting gRNA
aggctaactggttatacccgcgg

SEQ ID NO: 3934 - DNA, 23 bp, Artificial Sequence
  HLA-A targeting gRNA
aggctaactggttatgcccacgg

SEQ ID NO: 3935 - DNA, 23 bp, Artificial Sequence
  HLA-A targeting gRNA
aggctaactggttatgcccgcgg

SEQ ID NO: 3936 - DNA, 23 bp, Artificial Sequence
  HLA-A targeting gRNA
aggctcttgaagtcacaaagggg

SEQ ID NO: 3937 - DNA, 23 bp, Artificial Sequence
  HLA-A targeting gRNA
aggctgaccgagagagcctgcgg

SEQ ID NO: 3938 - DNA, 23 bp, Artificial Sequence
  HLA-A targeting gRNA
aggctgaccgagtgaacctgcgg

SEQ ID NO: 3939 - DNA, 23 bp, Artificial Sequence
  HLA-A targeting gRNA
aggctgaccgagtgagcctgcgg

SEQ ID NO: 3940 - DNA, 23 bp, Artificial Sequence
  HLA-A targeting gRNA
aggctgcatgtaagtgatggcgg

SEQ ID NO: 3941 - DNA, 23 bp, Artificial Sequence
  HLA-A targeting gRNA
aggctgcattagcccctgtgtgg

SEQ ID NO: 3942 - DNA, 23 bp, Artificial Sequence
  HLA-A targeting gRNA
aggctgcgtgtaaatgatggcgg

SEQ ID NO: 3943 - DNA, 23 bp, Artificial Sequence
  HLA-A targeting gRNA
aggctgcgtgtaagtgatgccgg

SEQ ID NO: 3944 - DNA, 23 bp, Artificial Sequence
  HLA-A targeting gRNA
aggctgcgtgtaagtgatggcgg

SEQ ID NO: 3945 - DNA, 23 bp, Artificial Sequence
  HLA-A targeting gRNA
aggctgcgtgtaagtgatggggg

SEQ ID NO: 3946 - DNA, 23 bp, Artificial Sequence
  HLA-A targeting gRNA
aggctgcgtgtaagtggtggggg

SEQ ID NO: 3947 - DNA, 23 bp, Artificial Sequence
  HLA-A targeting gRNA
aggctgcgttagcccctgtgagg

SEQ ID NO: 3948 - DNA, 23 bp, Artificial Sequence
  HLA-A targeting gRNA
aggctgcgttagcccctgtgtgg

SEQ ID NO: 3949 - DNA, 23 bp, Artificial Sequence
  HLA-A targeting gRNA
aggctgctgacctttctctcagg

SEQ ID NO: 3950 - DNA, 23 bp, Artificial Sequence
  HLA-A targeting gRNA
aggctgctgacttttctctcagg

SEQ ID NO: 3951 - DNA, 23 bp, Artificial Sequence
  HLA-A targeting gRNA
aggctgctgcaggggtcaaaggg

SEQ ID NO: 3952 - DNA, 23 bp, Artificial Sequence
  HLA-A targeting gRNA
aggctgggatggcccacgtgtgg

SEQ ID NO: 3953 - DNA, 23 bp, Artificial Sequence
  HLA-A targeting gRNA
aggctgggatggcccaggtgtgg

SEQ ID NO: 3954 - DNA, 23 bp, Artificial Sequence
  HLA-A targeting gRNA
aggctgggatggcccatgtgtgg

SEQ ID NO: 3955 - DNA, 23 bp, Artificial Sequence
  HLA-A targeting gRNA
aggctgtgttagcccctgtgtgg

SEQ ID NO: 3956 - DNA, 23 bp, Artificial Sequence
  HLA-A targeting gRNA
agggaaaaggcctaggtaatggg

SEQ ID NO: 3957 - DNA, 23 bp, Artificial Sequence
  HLA-A targeting gRNA
agggaaaaggcctgggtaatggg

SEQ ID NO: 3958 - DNA, 23 bp, Artificial Sequence
  HLA-A targeting gRNA
agggaaagcagaagtccttctgg

SEQ ID NO: 3959 - DNA, 23 bp, Artificial Sequence
  HLA-A targeting gRNA
agggaaagcaggagcccttctgg

SEQ ID NO: 3960 - DNA, 23 bp, Artificial Sequence
  HLA-A targeting gRNA
agggagcctgggggcgaggaggg

SEQ ID NO: 3961 - DNA, 23 bp, Artificial Sequence
  HLA-A targeting gRNA
agggaggcggatctcggacccgg

SEQ ID NO: 3962 - DNA, 23 bp, Artificial Sequence
  HLA-A targeting gRNA
agggaggggccctcccggcgagg

SEQ ID NO: 3963 - DNA, 23 bp, Artificial Sequence
  HLA-A targeting gRNA
agggcaggatcaggaaacacagg

SEQ ID NO: 3964 - DNA, 23 bp, Artificial Sequence
  HLA-A targeting gRNA
agggcaggatcaggaaacacggg

SEQ ID NO: 3965 - DNA, 23 bp, Artificial Sequence
  HLA-A targeting gRNA
agggcaggatcaggaaacatggg

SEQ ID NO: 3966 - DNA, 23 bp, Artificial Sequence
  HLA-A targeting gRNA
agggcgcaggacccggggagcgg

SEQ ID NO: 3967 - DNA, 23 bp, Artificial Sequence
  HLA-A targeting gRNA
agggcggggcggggctcgggggg

SEQ ID NO: 3968 - DNA, 23 bp, Artificial Sequence
  HLA-A targeting gRNA
agggctgaggcttggaggtcagg

SEQ ID NO: 3969 - DNA, 23 bp, Artificial Sequence
  HLA-A targeting gRNA
agggctgaggcttgggggtcagg

SEQ ID NO: 3970 - DNA, 23 bp, Artificial Sequence
  HLA-A targeting gRNA
agggctgaggcttgggtgtaagg

SEQ ID NO: 3971 - DNA, 23 bp, Artificial Sequence
  HLA-A targeting gRNA
aggggaaaggcctgggtaatggg

SEQ ID NO: 3972 - DNA, 23 bp, Artificial Sequence
  HLA-A targeting gRNA
aggggagccccgggcgccgtggg

SEQ ID NO: 3973 - DNA, 23 bp, Artificial Sequence
  HLA-A targeting gRNA
aggggagccgcaggcgccgtggg

SEQ ID NO: 3974 - DNA, 23 bp, Artificial Sequence
  HLA-A targeting gRNA
aggggagccgcgggagccgtggg

SEQ ID NO: 3975 - DNA, 23 bp, Artificial Sequence
  HLA-A targeting gRNA
aggggagccgcgggcgccgtggg

SEQ ID NO: 3976 - DNA, 23 bp, Artificial Sequence
  HLA-A targeting gRNA
aggggccagagtattgggaccgg

SEQ ID NO: 3977 - DNA, 23 bp, Artificial Sequence
  HLA-A targeting gRNA
aggggccccgaccctgctgaagg

SEQ ID NO: 3978 - DNA, 23 bp, Artificial Sequence
  HLA-A targeting gRNA
aggggccctgaccctgctgaagg

SEQ ID NO: 3979 - DNA, 23 bp, Artificial Sequence
  HLA-A targeting gRNA
aggggccggaatattgggaccgg

SEQ ID NO: 3980 - DNA, 23 bp, Artificial Sequence
  HLA-A targeting gRNA
aggggccggaatattgggacggg

SEQ ID NO: 3981 - DNA, 23 bp, Artificial Sequence
  HLA-A targeting gRNA
aggggccggagcattgggaccgg

SEQ ID NO: 3982 - DNA, 23 bp, Artificial Sequence
  HLA-A targeting gRNA
aggggccggagtactgggaccgg

SEQ ID NO: 3983 - DNA, 23 bp, Artificial Sequence
  HLA-A targeting gRNA
aggggccggagtattaggaccgg

SEQ ID NO: 3984 - DNA, 23 bp, Artificial Sequence
  HLA-A targeting gRNA
aggggccggagtgttgggaccgg

SEQ ID NO: 3985 - DNA, 23 bp, Artificial Sequence
  HLA-A targeting gRNA
aggggctggagtattgggaccgg

SEQ ID NO: 3986 - DNA, 23 bp, Artificial Sequence
  HLA-A targeting gRNA
agggggaaaggcctgggtaatgg

SEQ ID NO: 3987 - DNA, 23 bp, Artificial Sequence
  HLA-A targeting gRNA
aggggggcggatctcggacccgg

SEQ ID NO: 3988 - DNA, 23 bp, Artificial Sequence
  HLA-A targeting gRNA
aggggggtggatctcggacccgg

SEQ ID NO: 3989 - DNA, 23 bp, Artificial Sequence
  HLA-A targeting gRNA
aggggggtggtggggcagagggg

SEQ ID NO: 3990 - DNA, 23 bp, Artificial Sequence
  HLA-A targeting gRNA
agggggtcggatctcggacccgg

SEQ ID NO: 3991 - DNA, 23 bp, Artificial Sequence
  HLA-A targeting gRNA
aggggtcacagtggacacaaggg

SEQ ID NO: 3992 - DNA, 23 bp, Artificial Sequence
  HLA-A targeting gRNA
aggggtcacagtggacacggggg

SEQ ID NO: 3993 - DNA, 23 bp, Artificial Sequence
  HLA-A targeting gRNA
aggggtcacggtggacacggggg

SEQ ID NO: 3994 - DNA, 23 bp, Artificial Sequence
  HLA-A targeting gRNA
aggggtcatatctcttctcaggg

SEQ ID NO: 3995 - DNA, 23 bp, Artificial Sequence
  HLA-A targeting gRNA
aggggtcatatctgttctcaggg

SEQ ID NO: 3996 - DNA, 23 bp, Artificial Sequence
  HLA-A targeting gRNA
aggggtcatgtgtcttctcaggg

SEQ ID NO: 3997 - DNA, 23 bp, Artificial Sequence
  HLA-A targeting gRNA
aggggtcctgaccctgctgaagg

SEQ ID NO: 3998 - DNA, 23 bp, Artificial Sequence
  HLA-A targeting gRNA
aggggtcgggacctgcgccccgg

SEQ ID NO: 3999 - DNA, 23 bp, Artificial Sequence
  HLA-A targeting gRNA
aggggtgaagagcggggtctggg

SEQ ID NO: 4000 - DNA, 23 bp, Artificial Sequence
  HLA-A targeting gRNA
aggggtgaggagtggggtctggg

SEQ ID NO: 4001 - DNA, 23 bp, Artificial Sequence
  HLA-A targeting gRNA
aggggtgaggggtggggtctggg

SEQ ID NO: 4002 - DNA, 23 bp, Artificial Sequence
  HLA-A targeting gRNA
aggggtgatgtgtcttctcaggg

SEQ ID NO: 4003 - DNA, 23 bp, Artificial Sequence
  HLA-A targeting gRNA
aggggtggggagtggggtctggg

SEQ ID NO: 4004 - DNA, 23 bp, Artificial Sequence
  HLA-A targeting gRNA
agggtatgagaccctggccccgg

SEQ ID NO: 4005 - DNA, 23 bp, Artificial Sequence
  HLA-A targeting gRNA
agggtgtgagaccctggcccagg

SEQ ID NO: 4006 - DNA, 23 bp, Artificial Sequence
  HLA-A targeting gRNA
agggtgtgagaccctggccccgg

SEQ ID NO: 4007 - DNA, 23 bp, Artificial Sequence
  HLA-A targeting gRNA
agggtgtgagaccctggcctagg

SEQ ID NO: 4008 - DNA, 23 bp, Artificial Sequence
  HLA-A targeting gRNA
aggtatctgcggtgccctccagg

SEQ ID NO: 4009 - DNA, 23 bp, Artificial Sequence
  HLA-A targeting gRNA
aggtcaaaatccccgcgggttgg

SEQ ID NO: 4010 - DNA, 23 bp, Artificial Sequence
  HLA-A targeting gRNA
aggtcagggctgaggcttggggg

SEQ ID NO: 4011 - DNA, 23 bp, Artificial Sequence
  HLA-A targeting gRNA
aggtcagtgtgatctccccaggg

SEQ ID NO: 4012 - DNA, 23 bp, Artificial Sequence
  HLA-A targeting gRNA
aggtcagtgtgatctccgtaggg

SEQ ID NO: 4013 - DNA, 23 bp, Artificial Sequence
  HLA-A targeting gRNA
aggtcccggacggggctctcagg

SEQ ID NO: 4014 - DNA, 23 bp, Artificial Sequence
  HLA-A targeting gRNA
aggtcccgggcggggctctcagg

SEQ ID NO: 4015 - DNA, 23 bp, Artificial Sequence
  HLA-A targeting gRNA
aggtcccgggcggggctctctgg

SEQ ID NO: 4016 - DNA, 23 bp, Artificial Sequence
  HLA-A targeting gRNA
aggtcccgggcggggttctcagg

SEQ ID NO: 4017 - DNA, 23 bp, Artificial Sequence
  HLA-A targeting gRNA
aggtcctgcgcccccgcctgcgg

SEQ ID NO: 4018 - DNA, 23 bp, Artificial Sequence
  HLA-A targeting gRNA
aggtgccggaggattgggaccgg

SEQ ID NO: 4019 - DNA, 23 bp, Artificial Sequence
  HLA-A targeting gRNA
aggtggggcacacttctacctgg

SEQ ID NO: 4020 - DNA, 23 bp, Artificial Sequence
  HLA-A targeting gRNA
aggttgcgtgtaagtgatggcgg

SEQ ID NO: 4021 - DNA, 23 bp, Artificial Sequence
  HLA-A targeting gRNA
agtactggttatgcccgcggagg

SEQ ID NO: 4022 - DNA, 23 bp, Artificial Sequence
  HLA-A targeting gRNA
agtagaacaaaaacaggacctgg

SEQ ID NO: 4023 - DNA, 23 bp, Artificial Sequence
  HLA-A targeting gRNA
agtagaaccaaaacaggacctgg

SEQ ID NO: 4024 - DNA, 23 bp, Artificial Sequence
  HLA-A targeting gRNA
agtagccaagcaggttccgcagg

SEQ ID NO: 4025 - DNA, 23 bp, Artificial Sequence
  HLA-A targeting gRNA
agtagccgcgcaggatccgcagg

SEQ ID NO: 4026 - DNA, 23 bp, Artificial Sequence
  HLA-A targeting gRNA
agtagccgcgcagggtccgcagg

SEQ ID NO: 4027 - DNA, 23 bp, Artificial Sequence
  HLA-A targeting gRNA
agtagccgcgcaggttccgcagg

SEQ ID NO: 4028 - DNA, 23 bp, Artificial Sequence
  HLA-A targeting gRNA
agtagccgcgcaggtttcgcagg

SEQ ID NO: 4029 - DNA, 23 bp, Artificial Sequence
  HLA-A targeting gRNA
agtagccgcgcagttgccgcagg

SEQ ID NO: 4030 - DNA, 23 bp, Artificial Sequence
  HLA-A targeting gRNA
agtagccgcgcagtttccgcagg

SEQ ID NO: 4031 - DNA, 23 bp, Artificial Sequence
  HLA-A targeting gRNA
agtagcggagcagggtccgcagg

SEQ ID NO: 4032 - DNA, 23 bp, Artificial Sequence
  HLA-A targeting gRNA
agtagcggagcgcgatcctcagg

SEQ ID NO: 4033 - DNA, 23 bp, Artificial Sequence
  HLA-A targeting gRNA
agtagcggagcgcggtgcgcagg

SEQ ID NO: 4034 - DNA, 23 bp, Artificial Sequence
  HLA-A targeting gRNA
agtagctgcgcaggttccgcagg

SEQ ID NO: 4035 - DNA, 23 bp, Artificial Sequence
  HLA-A targeting gRNA
agtattgggaccgggagacacgg

SEQ ID NO: 4036 - DNA, 23 bp, Artificial Sequence
  HLA-A targeting gRNA
agtcagggccatgcgatcttagg

SEQ ID NO: 4037 - DNA, 23 bp, Artificial Sequence
  HLA-A targeting gRNA
agtccctagaatactgatcaggg

SEQ ID NO: 4038 - DNA, 23 bp, Artificial Sequence
  HLA-A targeting gRNA
agtccctaggatagtgatcaggg

SEQ ID NO: 4039 - DNA, 23 bp, Artificial Sequence
  HLA-A targeting gRNA
agtccctataatactgatcaggg

SEQ ID NO: 4040 - DNA, 23 bp, Artificial Sequence
  HLA-A targeting gRNA
agtccctggaatactgatcaggg

SEQ ID NO: 4041 - DNA, 23 bp, Artificial Sequence
  HLA-A targeting gRNA
agtccgagaaggggagccgcggg

SEQ ID NO: 4042 - DNA, 23 bp, Artificial Sequence
  HLA-A targeting gRNA
agtcctggagcccttcagccagg

SEQ ID NO: 4043 - DNA, 23 bp, Artificial Sequence
  HLA-A targeting gRNA
agtcctggagcccttcagccggg

SEQ ID NO: 4044 - DNA, 23 bp, Artificial Sequence
  HLA-A targeting gRNA
agtcctggagcccttcagctggg

SEQ ID NO: 4045 - DNA, 23 bp, Artificial Sequence
  HLA-A targeting gRNA
agtgccatgttcagcacgagggg

SEQ ID NO: 4046 - DNA, 23 bp, Artificial Sequence
  HLA-A targeting gRNA
agtgcgggtcggcagggaaatgg

SEQ ID NO: 4047 - DNA, 23 bp, Artificial Sequence
  HLA-A targeting gRNA
agtgcgggtcgggagggaaatgg

SEQ ID NO: 4048 - DNA, 23 bp, Artificial Sequence
  HLA-A targeting gRNA
agtggccctgaccgagacctggg

SEQ ID NO: 4049 - DNA, 23 bp, Artificial Sequence
  HLA-A targeting gRNA
agtggccgcgcaggttccgcagg

SEQ ID NO: 4050 - DNA, 23 bp, Artificial Sequence
  HLA-A targeting gRNA
agtggccgcgcagtttccgcagg

SEQ ID NO: 4051 - DNA, 23 bp, Artificial Sequence
  HLA-A targeting gRNA
agtggctccgcagatacctgggg

SEQ ID NO: 4052 - DNA, 23 bp, Artificial Sequence
  HLA-A targeting gRNA
agtgggagcctggggcaaggagg

SEQ ID NO: 4053 - DNA, 23 bp, Artificial Sequence
  HLA-A targeting gRNA
agtgggcgggggggcggggaggg

SEQ ID NO: 4054 - DNA, 23 bp, Artificial Sequence
  HLA-A targeting gRNA
agtgggcggggggggcggggagg

SEQ ID NO: 4055 - DNA, 23 bp, Artificial Sequence
  HLA-A targeting gRNA
agtgggcggggggggtggggtgg

SEQ ID NO: 4056 - DNA, 23 bp, Artificial Sequence
  HLA-A targeting gRNA
agtgggcggggggggtggtgggg

SEQ ID NO: 4057 - DNA, 23 bp, Artificial Sequence
  HLA-A targeting gRNA
agtgggtggggtggcaggtctgg

SEQ ID NO: 4058 - DNA, 23 bp, Artificial Sequence
  HLA-A targeting gRNA
agtgggtggggtggcgggtctgg

SEQ ID NO: 4059 - DNA, 23 bp, Artificial Sequence
  HLA-A targeting gRNA
agtggtcaaagtggtcaaagggg

SEQ ID NO: 4060 - DNA, 23 bp, Artificial Sequence
  HLA-A targeting gRNA
agtggtcgaagtggtcaaagggg

SEQ ID NO: 4061 - DNA, 23 bp, Artificial Sequence
  HLA-A targeting gRNA
agtggtcgggggtggggcagagg

SEQ ID NO: 4062 - DNA, 23 bp, Artificial Sequence
  HLA-A targeting gRNA
agtggtctggggtggggcagagg

SEQ ID NO: 4063 - DNA, 23 bp, Artificial Sequence
  HLA-A targeting gRNA
agtgtgccccacctcgttactgg

SEQ ID NO: 4064 - DNA, 23 bp, Artificial Sequence
  HLA-A targeting gRNA
agtgtgccccgccttgttactgg

SEQ ID NO: 4065 - DNA, 23 bp, Artificial Sequence
  HLA-A targeting gRNA
agtgttccctgcatcattactgg

SEQ ID NO: 4066 - DNA, 23 bp, Artificial Sequence
  HLA-A targeting gRNA
agtgttccctgcctcattactgg

SEQ ID NO: 4067 - DNA, 23 bp, Artificial Sequence
  HLA-A targeting gRNA
agttgaggccaaaatccccgcgg

SEQ ID NO: 4068 - DNA, 23 bp, Artificial Sequence
  HLA-A targeting gRNA
agttgaggtcaaaatccccgcgg

SEQ ID NO: 4069 - DNA, 23 bp, Artificial Sequence
  HLA-A targeting gRNA
agttgtggtcatcggagctgtgg

SEQ ID NO: 4070 - DNA, 23 bp, Artificial Sequence
  HLA-A targeting gRNA
agtttaggccaaaatccccgcgg

SEQ ID NO: 4071 - DNA, 23 bp, Artificial Sequence
  HLA-A targeting gRNA
atacataggaggaagagctcagg

SEQ ID NO: 4072 - DNA, 23 bp, Artificial Sequence
  HLA-A targeting gRNA
atacttctggaaattccttttgg

SEQ ID NO: 4073 - DNA, 23 bp, Artificial Sequence
  HLA-A targeting gRNA
atacttctggaaattctttttgg

SEQ ID NO: 4074 - DNA, 23 bp, Artificial Sequence
  HLA-A targeting gRNA
atagcccacggtgatgaagcggg

SEQ ID NO: 4075 - DNA, 23 bp, Artificial Sequence
  HLA-A targeting gRNA
ataggaggaagagctcaggtagg

SEQ ID NO: 4076 - DNA, 23 bp, Artificial Sequence
  HLA-A targeting gRNA
atagggacgtttcgaatgtgtgg

SEQ ID NO: 4077 - DNA, 23 bp, Artificial Sequence
  HLA-A targeting gRNA
atagggcattttcttcccacagg

SEQ ID NO: 4078 - DNA, 23 bp, Artificial Sequence
  HLA-A targeting gRNA
atagttctggaaacttctcttgg

SEQ ID NO: 4079 - DNA, 23 bp, Artificial Sequence
  HLA-A targeting gRNA
atatgtatggctgcgacgtgggg

SEQ ID NO: 4080 - DNA, 23 bp, Artificial Sequence
  HLA-A targeting gRNA
atccaatacccaatgggagtggg

SEQ ID NO: 4081 - DNA, 23 bp, Artificial Sequence
  HLA-A targeting gRNA
atccacccccctgaggccgcggg

SEQ ID NO: 4082 - DNA, 23 bp, Artificial Sequence
  HLA-A targeting gRNA
atccgacacccaatgggagtggg

SEQ ID NO: 4083 - DNA, 23 bp, Artificial Sequence
  HLA-A targeting gRNA
atccgaccccctgaggccgcggg

SEQ ID NO: 4084 - DNA, 23 bp, Artificial Sequence
  HLA-A targeting gRNA
atccgcccccctgaggccgcggg

SEQ ID NO: 4085 - DNA, 23 bp, Artificial Sequence
  HLA-A targeting gRNA
atccgcctccctgaggccgcggg

SEQ ID NO: 4086 - DNA, 23 bp, Artificial Sequence
  HLA-A targeting gRNA
atcctctggatgtgagaccctgg

SEQ ID NO: 4087 - DNA, 23 bp, Artificial Sequence
  HLA-A targeting gRNA
atctcagacccggagactcgggg

SEQ ID NO: 4088 - DNA, 23 bp, Artificial Sequence
  HLA-A targeting gRNA
atctcagaccgggagactcgggg

SEQ ID NO: 4089 - DNA, 23 bp, Artificial Sequence
  HLA-A targeting gRNA
atctcagaccgggagacttgggg

SEQ ID NO: 4090 - DNA, 23 bp, Artificial Sequence
  HLA-A targeting gRNA
atctcagacggggagactcgggg

SEQ ID NO: 4091 - DNA, 23 bp, Artificial Sequence
  HLA-A targeting gRNA
atctcagacggggagactctagg

SEQ ID NO: 4092 - DNA, 23 bp, Artificial Sequence
  HLA-A targeting gRNA
atctcagacggggagactctggg

SEQ ID NO: 4093 - DNA, 23 bp, Artificial Sequence
  HLA-A targeting gRNA
atctcagtgggctacgtggacgg

SEQ ID NO: 4094 - DNA, 23 bp, Artificial Sequence
  HLA-A targeting gRNA
atctcctgcgggctctgaccagg

SEQ ID NO: 4095 - DNA, 23 bp, Artificial Sequence
  HLA-A targeting gRNA
atctcctgtgggctctgaccagg

SEQ ID NO: 4096 - DNA, 23 bp, Artificial Sequence
  HLA-A targeting gRNA
atctcggacccggagactcgggg

SEQ ID NO: 4097 - DNA, 23 bp, Artificial Sequence
  HLA-A targeting gRNA
atctcggaccctgagactcgggg

SEQ ID NO: 4098 - DNA, 23 bp, Artificial Sequence
  HLA-A targeting gRNA
atctcggacctagagactcgagg

SEQ ID NO: 4099 - DNA, 23 bp, Artificial Sequence
  HLA-A targeting gRNA
atctgcggtgccctccaggtagg

SEQ ID NO: 4100 - DNA, 23 bp, Artificial Sequence
  HLA-A targeting gRNA
atgaacctgcggaaactgcgcgg

SEQ ID NO: 4101 - DNA, 23 bp, Artificial Sequence
  HLA-A targeting gRNA
atgacccgcatctcggcctctgg

SEQ ID NO: 4102 - DNA, 23 bp, Artificial Sequence
  HLA-A targeting gRNA
atgacccgcatctcggcgtctgg

SEQ ID NO: 4103 - DNA, 23 bp, Artificial Sequence
  HLA-A targeting gRNA
atgaggggcttcggtaaggaggg

SEQ ID NO: 4104 - DNA, 23 bp, Artificial Sequence
  HLA-A targeting gRNA
atgaggtcaccctgaggtgctgg

SEQ ID NO: 4105 - DNA, 23 bp, Artificial Sequence
  HLA-A targeting gRNA
atgatgtgagaccctggccccgg

SEQ ID NO: 4106 - DNA, 23 bp, Artificial Sequence
  HLA-A targeting gRNA
atgcagggaacacttctacctgg

SEQ ID NO: 4107 - DNA, 23 bp, Artificial Sequence
  HLA-A targeting gRNA
atgcccaagttggggatggtggg

SEQ ID NO: 4108 - DNA, 23 bp, Artificial Sequence
  HLA-A targeting gRNA
atgcccatgatggggatggtagg

SEQ ID NO: 4109 - DNA, 23 bp, Artificial Sequence
  HLA-A targeting gRNA
atgcccatgatggggatggtggg

SEQ ID NO: 4110 - DNA, 23 bp, Artificial Sequence
  HLA-A targeting gRNA
atggacaggacacctggggtagg

SEQ ID NO: 4111 - DNA, 23 bp, Artificial Sequence
  HLA-A targeting gRNA
atggacaggacacctggggtggg

SEQ ID NO: 4112 - DNA, 23 bp, Artificial Sequence
  HLA-A targeting gRNA
atggacaggacacctggtgtggg

SEQ ID NO: 4113 - DNA, 23 bp, Artificial Sequence
  HLA-A targeting gRNA
atggacgggacacctggggtggg

SEQ ID NO: 4114 - DNA, 23 bp, Artificial Sequence
  HLA-A targeting gRNA
atggaggggaagacagtccctgg

SEQ ID NO: 4115 - DNA, 23 bp, Artificial Sequence
  HLA-A targeting gRNA
atggagtaaggagggggatgagg

SEQ ID NO: 4116 - DNA, 23 bp, Artificial Sequence
  HLA-A targeting gRNA
atggatagagcaagaggggccgg

SEQ ID NO: 4117 - DNA, 23 bp, Artificial Sequence
  HLA-A targeting gRNA
atggatagagcaggaggggccgg

SEQ ID NO: 4118 - DNA, 23 bp, Artificial Sequence
  HLA-A targeting gRNA
atggatagagcaggaggggctgg

SEQ ID NO: 4119 - DNA, 23 bp, Artificial Sequence
  HLA-A targeting gRNA
atggatagagcaggaggtgccgg

SEQ ID NO: 4120 - DNA, 23 bp, Artificial Sequence
  HLA-A targeting gRNA
atggctcccatctcagggtgagg

SEQ ID NO: 4121 - DNA, 23 bp, Artificial Sequence
  HLA-A targeting gRNA
atgggaggcggcccgtgtggcgg

SEQ ID NO: 4122 - DNA, 23 bp, Artificial Sequence
  HLA-A targeting gRNA
atgggcaggacacctggggtggg

SEQ ID NO: 4123 - DNA, 23 bp, Artificial Sequence
  HLA-A targeting gRNA
atggggtaaggagggggatgagg

SEQ ID NO: 4124 - DNA, 23 bp, Artificial Sequence
  HLA-A targeting gRNA
atggtcagagacgagatggtggg

SEQ ID NO: 4125 - DNA, 23 bp, Artificial Sequence
  HLA-A targeting gRNA
atggtcagagacgggatggtggg

SEQ ID NO: 4126 - DNA, 23 bp, Artificial Sequence
  HLA-A targeting gRNA
atggtcagagacggggtggtggg

SEQ ID NO: 4127 - DNA, 23 bp, Artificial Sequence
  HLA-A targeting gRNA
atggtcagagagggggtggtggg

SEQ ID NO: 4128 - DNA, 23 bp, Artificial Sequence
  HLA-A targeting gRNA
atggtcagagatgggatggtggg

SEQ ID NO: 4129 - DNA, 23 bp, Artificial Sequence
  HLA-A targeting gRNA
atggtgtgagaacctggccccgg

SEQ ID NO: 4130 - DNA, 23 bp, Artificial Sequence
  HLA-A targeting gRNA
atggtgtgagaccctggccccgg

SEQ ID NO: 4131 - DNA, 23 bp, Artificial Sequence
  HLA-A targeting gRNA
atggttcccaaggctgctgcagg

SEQ ID NO: 4132 - DNA, 23 bp, Artificial Sequence
  HLA-A targeting gRNA
atgtaatcccttgccgtcgtagg

SEQ ID NO: 4133 - DNA, 23 bp, Artificial Sequence
  HLA-A targeting gRNA
atgtacagcatgaggggcttcgg

SEQ ID NO: 4134 - DNA, 23 bp, Artificial Sequence
  HLA-A targeting gRNA
atgtatcaccgtggtggttgtgg

SEQ ID NO: 4135 - DNA, 23 bp, Artificial Sequence
  HLA-A targeting gRNA
atgtatcacctcgatggttgtgg

SEQ ID NO: 4136 - DNA, 23 bp, Artificial Sequence
  HLA-A targeting gRNA
atgtatcaccttaatggttgtgg

SEQ ID NO: 4137 - DNA, 23 bp, Artificial Sequence
  HLA-A targeting gRNA
atgtatcaccttgatgattatgg

SEQ ID NO: 4138 - DNA, 23 bp, Artificial Sequence
  HLA-A targeting gRNA
atgtatcaccttgatggttgtgg

SEQ ID NO: 4139 - DNA, 23 bp, Artificial Sequence
  HLA-A targeting gRNA
atgtatcaccttggtggttgtgg

SEQ ID NO: 4140 - DNA, 23 bp, Artificial Sequence
  HLA-A targeting gRNA
atgtatcgccttgatggttgtgg

SEQ ID NO: 4141 - DNA, 23 bp, Artificial Sequence
  HLA-A targeting gRNA
atgtcccggacggggctctcagg

SEQ ID NO: 4142 - DNA, 23 bp, Artificial Sequence
  HLA-A targeting gRNA
atgtgggacaagaggaattatgg

SEQ ID NO: 4143 - DNA, 23 bp, Artificial Sequence
  HLA-A targeting gRNA
atgtgtaggaggaagagctcagg

SEQ ID NO: 4144 - DNA, 23 bp, Artificial Sequence
  HLA-A targeting gRNA
atgtgtaggaggaagagttcagg

SEQ ID NO: 4145 - DNA, 23 bp, Artificial Sequence
  HLA-A targeting gRNA
atgtgtaggaggaagagttctgg

SEQ ID NO: 4146 - DNA, 23 bp, Artificial Sequence
  HLA-A targeting gRNA
attaaggaatgacgtctctgagg

SEQ ID NO: 4147 - DNA, 23 bp, Artificial Sequence
  HLA-A targeting gRNA
attaagggatgaagtccctgagg

SEQ ID NO: 4148 - DNA, 23 bp, Artificial Sequence
  HLA-A targeting gRNA
attaagggatgaagtccttgagg

SEQ ID NO: 4149 - DNA, 23 bp, Artificial Sequence
  HLA-A targeting gRNA
attaagggatgaagtctctgagg

SEQ ID NO: 4150 - DNA, 23 bp, Artificial Sequence
  HLA-A targeting gRNA
attaagggatgacatctctgagg

SEQ ID NO: 4151 - DNA, 23 bp, Artificial Sequence
  HLA-A targeting gRNA
attaagggatgacgtctctgagg

SEQ ID NO: 4152 - DNA, 23 bp, Artificial Sequence
  HLA-A targeting gRNA
attaagggatggcgtctctgagg

SEQ ID NO: 4153 - DNA, 23 bp, Artificial Sequence
  HLA-A targeting gRNA
attccagcatcatgagtcagggg

SEQ ID NO: 4154 - DNA, 23 bp, Artificial Sequence
  HLA-A targeting gRNA
attccagcattcatgagtcaggg

SEQ ID NO: 4155 - DNA, 23 bp, Artificial Sequence
  HLA-A targeting gRNA
attccagcattcatgagtcgggg

SEQ ID NO: 4156 - DNA, 23 bp, Artificial Sequence
  HLA-A targeting gRNA
attccagcattcgtgagtcaggg

SEQ ID NO: 4157 - DNA, 23 bp, Artificial Sequence
  HLA-A targeting gRNA
attcgaaacgtcccaatcaaagg

SEQ ID NO: 4158 - DNA, 23 bp, Artificial Sequence
  HLA-A targeting gRNA
attcgaaacgtccctatcaaagg

SEQ ID NO: 4159 - DNA, 23 bp, Artificial Sequence
  HLA-A targeting gRNA
attctgggagctgaagtggtcgg

SEQ ID NO: 4160 - DNA, 23 bp, Artificial Sequence
  HLA-A targeting gRNA
attgggacgtttcgaatgtgtgg

SEQ ID NO: 4161 - DNA, 23 bp, Artificial Sequence
  HLA-A targeting gRNA
attgggacgtttcgagtgtgtgg

SEQ ID NO: 4162 - DNA, 23 bp, Artificial Sequence
  HLA-A targeting gRNA
attgggatgttacgcgtgtgtgg

SEQ ID NO: 4163 - DNA, 23 bp, Artificial Sequence
  HLA-A targeting gRNA
attgggatgtttcgcgtgtgtgg

SEQ ID NO: 4164 - DNA, 23 bp, Artificial Sequence
  HLA-A targeting gRNA
attggggaggcgcagcattgggg

SEQ ID NO: 4165 - DNA, 23 bp, Artificial Sequence
  HLA-A targeting gRNA
attggggaggcgcagcgttgggg

SEQ ID NO: 4166 - DNA, 23 bp, Artificial Sequence
  HLA-A targeting gRNA
attggggaggcgccgcgttgggg

SEQ ID NO: 4167 - DNA, 23 bp, Artificial Sequence
  HLA-A targeting gRNA
attgtcctagacagcagaggggg

SEQ ID NO: 4168 - DNA, 23 bp, Artificial Sequence
  HLA-A targeting gRNA
attgtcctagagagaagaggggg

SEQ ID NO: 4169 - DNA, 23 bp, Artificial Sequence
  HLA-A targeting gRNA
attgtcctagagagcagacgggg

SEQ ID NO: 4170 - DNA, 23 bp, Artificial Sequence
  HLA-A targeting gRNA
attgtcctagagagcagaggggg

SEQ ID NO: 4171 - DNA, 23 bp, Artificial Sequence
  HLA-A targeting gRNA
atttcagcattcatgagtcaggg

SEQ ID NO: 4172 - DNA, 23 bp, Artificial Sequence
  HLA-A targeting gRNA
atttccacaccgccatgtcccgg

SEQ ID NO: 4173 - DNA, 23 bp, Artificial Sequence
  HLA-A targeting gRNA
atttccacacctccgtgtcccgg

SEQ ID NO: 4174 - DNA, 23 bp, Artificial Sequence
  HLA-A targeting gRNA
atttcgacaccgccacgtcccgg

SEQ ID NO: 4175 - DNA, 23 bp, Artificial Sequence
  HLA-A targeting gRNA
atttcgacaccgccatgtcccgg

SEQ ID NO: 4176 - DNA, 23 bp, Artificial Sequence
  HLA-A targeting gRNA
atttcgacaccgccgtgtcccgg

SEQ ID NO: 4177 - DNA, 23 bp, Artificial Sequence
  HLA-A targeting gRNA
atttcgacaccgccgtgtcctgg

SEQ ID NO: 4178 - DNA, 23 bp, Artificial Sequence
  HLA-A targeting gRNA
atttctacaccgccatgacccgg

SEQ ID NO: 4179 - DNA, 23 bp, Artificial Sequence
  HLA-A targeting gRNA
atttctacaccgccatgtcccgg

SEQ ID NO: 4180 - DNA, 23 bp, Artificial Sequence
  HLA-A targeting gRNA
atttctacaccgccgtgtcccgg

SEQ ID NO: 4181 - DNA, 23 bp, Artificial Sequence
  HLA-A targeting gRNA
atttctacaccgccgtgtccggg

SEQ ID NO: 4182 - DNA, 23 bp, Artificial Sequence
  HLA-A targeting gRNA
atttctacaccgctatgtcccgg

SEQ ID NO: 4183 - DNA, 23 bp, Artificial Sequence
  HLA-A targeting gRNA
atttctacaccgctgtgtcccgg

SEQ ID NO: 4184 - DNA, 23 bp, Artificial Sequence
  HLA-A targeting gRNA
atttctccacatccgtgtcctgg

SEQ ID NO: 4185 - DNA, 23 bp, Artificial Sequence
  HLA-A targeting gRNA
atttcttcacatccgtgtcctgg

SEQ ID NO: 4186 - DNA, 23 bp, Artificial Sequence
  HLA-A targeting gRNA
caaaatccccgcgggttgggcgg

SEQ ID NO: 4187 - DNA, 23 bp, Artificial Sequence
  HLA-A targeting gRNA
caaaatccccgcgggttggtcgg

SEQ ID NO: 4188 - DNA, 23 bp, Artificial Sequence
  HLA-A targeting gRNA
caaacccctcaccctgagatggg

SEQ ID NO: 4189 - DNA, 23 bp, Artificial Sequence
  HLA-A targeting gRNA
caaactggttatgcccgcggagg

SEQ ID NO: 4190 - DNA, 23 bp, Artificial Sequence
  HLA-A targeting gRNA
caaagcccctcaccctgagatgg

SEQ ID NO: 4191 - DNA, 23 bp, Artificial Sequence
  HLA-A targeting gRNA
caaatgggaggcggcccgtgtgg

SEQ ID NO: 4192 - DNA, 23 bp, Artificial Sequence
  HLA-A targeting gRNA
caaatgtcctgtgagggcactgg

SEQ ID NO: 4193 - DNA, 23 bp, Artificial Sequence
  HLA-A targeting gRNA
caacacacagacttaccgagagg

SEQ ID NO: 4194 - DNA, 23 bp, Artificial Sequence
  HLA-A targeting gRNA
caacagccaccacagctcctagg

SEQ ID NO: 4195 - DNA, 23 bp, Artificial Sequence
  HLA-A targeting gRNA
caacagccaccatagctcctagg

SEQ ID NO: 4196 - DNA, 23 bp, Artificial Sequence
  HLA-A targeting gRNA
caacagccatcacagctcctagg

SEQ ID NO: 4197 - DNA, 23 bp, Artificial Sequence
  HLA-A targeting gRNA
caacagtcatgaacaaattctgg

SEQ ID NO: 4198 - DNA, 23 bp, Artificial Sequence
  HLA-A targeting gRNA
caacgagaagaagaggaaaatgg

SEQ ID NO: 4199 - DNA, 23 bp, Artificial Sequence
  HLA-A targeting gRNA
caacggagagcctacctggaggg

SEQ ID NO: 4200 - DNA, 23 bp, Artificial Sequence
  HLA-A targeting gRNA
caagagcccgcaggagacgtggg

SEQ ID NO: 4201 - DNA, 23 bp, Artificial Sequence
  HLA-A targeting gRNA
caagctcagtgtcctgaatttgg

SEQ ID NO: 4202 - DNA, 23 bp, Artificial Sequence
  HLA-A targeting gRNA
caagctcagtgtcctgagtttgg

SEQ ID NO: 4203 - DNA, 23 bp, Artificial Sequence
  HLA-A targeting gRNA
caagctcggtgtcctgagtttgg

SEQ ID NO: 4204 - DNA, 23 bp, Artificial Sequence
  HLA-A targeting gRNA
caagctcggtgtcctgggtctgg

SEQ ID NO: 4205 - DNA, 23 bp, Artificial Sequence
  HLA-A targeting gRNA
caagctgggtgtcctgagtttgg

SEQ ID NO: 4206 - DNA, 23 bp, Artificial Sequence
  HLA-A targeting gRNA
caaggacagctaggacaaccagg

SEQ ID NO: 4207 - DNA, 23 bp, Artificial Sequence
  HLA-A targeting gRNA
caaggcacagactgaccgagagg

SEQ ID NO: 4208 - DNA, 23 bp, Artificial Sequence
  HLA-A targeting gRNA
caaggcacagactgaccgagtgg

SEQ ID NO: 4209 - DNA, 23 bp, Artificial Sequence
  HLA-A targeting gRNA
caagggccgtgtctgcactgggg

SEQ ID NO: 4210 - DNA, 23 bp, Artificial Sequence
  HLA-A targeting gRNA
caagggccgtgtctgcattgggg

SEQ ID NO: 4211 - DNA, 23 bp, Artificial Sequence
  HLA-A targeting gRNA
caagtccgagaggggagccccgg

SEQ ID NO: 4212 - DNA, 23 bp, Artificial Sequence
  HLA-A targeting gRNA
caagtgccatgttcagcacgagg

SEQ ID NO: 4213 - DNA, 23 bp, Artificial Sequence
  HLA-A targeting gRNA
caagtgggaggcagcccgtgagg

SEQ ID NO: 4214 - DNA, 23 bp, Artificial Sequence
  HLA-A targeting gRNA
caagtgggaggcggcccgggtgg

SEQ ID NO: 4215 - DNA, 23 bp, Artificial Sequence
  HLA-A targeting gRNA
caagtgggaggcggcccgtacgg

SEQ ID NO: 4216 - DNA, 23 bp, Artificial Sequence
  HLA-A targeting gRNA
caagtgggaggcggcccgtatgg

SEQ ID NO: 4217 - DNA, 23 bp, Artificial Sequence
  HLA-A targeting gRNA
caagtgggaggcggcccgtgagg

SEQ ID NO: 4218 - DNA, 23 bp, Artificial Sequence
  HLA-A targeting gRNA
caagtgggaggcggcccgtgcgg

SEQ ID NO: 4219 - DNA, 23 bp, Artificial Sequence
  HLA-A targeting gRNA
caagtgggaggcggccggtgagg

SEQ ID NO: 4220 - DNA, 23 bp, Artificial Sequence
  HLA-A targeting gRNA
caagtgggaggcggcctgtgagg

SEQ ID NO: 4221 - DNA, 23 bp, Artificial Sequence
  HLA-A targeting gRNA
caagtgggaggcggctcgtgagg

SEQ ID NO: 4222 - DNA, 23 bp, Artificial Sequence
  HLA-A targeting gRNA
caagtgtgagaccctggcccagg

SEQ ID NO: 4223 - DNA, 23 bp, Artificial Sequence
  HLA-A targeting gRNA
caagtgtgagaccctggccccgg

SEQ ID NO: 4224 - DNA, 23 bp, Artificial Sequence
  HLA-A targeting gRNA
caagttggaggcggcccgtgagg

SEQ ID NO: 4225 - DNA, 23 bp, Artificial Sequence
  HLA-A targeting gRNA
caagttggaggcggcccgtgcgg

SEQ ID NO: 4226 - DNA, 23 bp, Artificial Sequence
  HLA-A targeting gRNA
caagttggaggcggcccgtgggg

SEQ ID NO: 4227 - DNA, 23 bp, Artificial Sequence
  HLA-A targeting gRNA
caagttggaggcggcccgtgtgg

SEQ ID NO: 4228 - DNA, 23 bp, Artificial Sequence
  HLA-A targeting gRNA
caagttggggatggtgggctggg

SEQ ID NO: 4229 - DNA, 23 bp, Artificial Sequence
  HLA-A targeting gRNA
caatagtcatgaacaaattcagg

SEQ ID NO: 4230 - DNA, 23 bp, Artificial Sequence
  HLA-A targeting gRNA
caatccaccgtccccatcgtggg

SEQ ID NO: 4231 - DNA, 23 bp, Artificial Sequence
  HLA-A targeting gRNA
caatgaagcggggctccccgcgg

SEQ ID NO: 4232 - DNA, 23 bp, Artificial Sequence
  HLA-A targeting gRNA
caatggggaggcgcagcgttggg

SEQ ID NO: 4233 - DNA, 23 bp, Artificial Sequence
  HLA-A targeting gRNA
cacacacaggccctccaggtagg

SEQ ID NO: 4234 - DNA, 23 bp, Artificial Sequence
  HLA-A targeting gRNA
cacacacgtgccctccaggtagg

SEQ ID NO: 4235 - DNA, 23 bp, Artificial Sequence
  HLA-A targeting gRNA
cacacagatctacaaggcccagg

SEQ ID NO: 4236 - DNA, 23 bp, Artificial Sequence
  HLA-A targeting gRNA
cacacagatctgcaaggccaagg

SEQ ID NO: 4237 - DNA, 23 bp, Artificial Sequence
  HLA-A targeting gRNA
cacaccatccagaggatgtacgg

SEQ ID NO: 4238 - DNA, 23 bp, Artificial Sequence
  HLA-A targeting gRNA
cacaccatccagaggatgtctgg

SEQ ID NO: 4239 - DNA, 23 bp, Artificial Sequence
  HLA-A targeting gRNA
cacacccgccagaggatgtacgg

SEQ ID NO: 4240 - DNA, 23 bp, Artificial Sequence
  HLA-A targeting gRNA
cacaccctccagaatatgtatgg

SEQ ID NO: 4241 - DNA, 23 bp, Artificial Sequence
  HLA-A targeting gRNA
cacaccctccagacgatgtacgg

SEQ ID NO: 4242 - DNA, 23 bp, Artificial Sequence
  HLA-A targeting gRNA
cacaccctccagagcatgtacgg

SEQ ID NO: 4243 - DNA, 23 bp, Artificial Sequence
  HLA-A targeting gRNA
cacaccctccagagcatgtatgg

SEQ ID NO: 4244 - DNA, 23 bp, Artificial Sequence
  HLA-A targeting gRNA
cacaccctccagagcttgtacgg

SEQ ID NO: 4245 - DNA, 23 bp, Artificial Sequence
  HLA-A targeting gRNA
cacaccctccagaggatgtacgg

SEQ ID NO: 4246 - DNA, 23 bp, Artificial Sequence
  HLA-A targeting gRNA
cacaccctccagaggatgtctgg

SEQ ID NO: 4247 - DNA, 23 bp, Artificial Sequence
  HLA-A targeting gRNA
cacaccctccagaggatgtttgg

SEQ ID NO: 4248 - DNA, 23 bp, Artificial Sequence
  HLA-A targeting gRNA
cacaccctccagcggatgtatgg

SEQ ID NO: 4249 - DNA, 23 bp, Artificial Sequence
  HLA-A targeting gRNA
cacaccctccagtggatgtacgg

SEQ ID NO: 4250 - DNA, 23 bp, Artificial Sequence
  HLA-A targeting gRNA
cacaccctccagtggatgtatgg

SEQ ID NO: 4251 - DNA, 23 bp, Artificial Sequence
  HLA-A targeting gRNA
cacaccctccagtggatgtgtgg

SEQ ID NO: 4252 - DNA, 23 bp, Artificial Sequence
  HLA-A targeting gRNA
cacaccctccagtggatgtttgg

SEQ ID NO: 4253 - DNA, 23 bp, Artificial Sequence
  HLA-A targeting gRNA
cacaccgccatgtcccggcccgg

SEQ ID NO: 4254 - DNA, 23 bp, Artificial Sequence
  HLA-A targeting gRNA
cacacctccgtgtcccggcccgg

SEQ ID NO: 4255 - DNA, 23 bp, Artificial Sequence
  HLA-A targeting gRNA
cacacctccgtgtcccggcctgg

SEQ ID NO: 4256 - DNA, 23 bp, Artificial Sequence
  HLA-A targeting gRNA
cacaccttccagaggatgtatgg

SEQ ID NO: 4257 - DNA, 23 bp, Artificial Sequence
  HLA-A targeting gRNA
cacacgggccgcctcccacttgg

SEQ ID NO: 4258 - DNA, 23 bp, Artificial Sequence
  HLA-A targeting gRNA
cacactctccagagcatgtacgg

SEQ ID NO: 4259 - DNA, 23 bp, Artificial Sequence
  HLA-A targeting gRNA
cacacttggcagacgatgtacgg

SEQ ID NO: 4260 - DNA, 23 bp, Artificial Sequence
  HLA-A targeting gRNA
cacacttggcagacgatgtatgg

SEQ ID NO: 4261 - DNA, 23 bp, Artificial Sequence
  HLA-A targeting gRNA
cacacttggcagaggatgtatgg

SEQ ID NO: 4262 - DNA, 23 bp, Artificial Sequence
  HLA-A targeting gRNA
cacagctgtccacttctggaagg

SEQ ID NO: 4263 - DNA, 23 bp, Artificial Sequence
  HLA-A targeting gRNA
cacaggagacgtgggacaggagg

SEQ ID NO: 4264 - DNA, 23 bp, Artificial Sequence
  HLA-A targeting gRNA
cacaggagatgtgggacaagagg

SEQ ID NO: 4265 - DNA, 23 bp, Artificial Sequence
  HLA-A targeting gRNA
cacaggcccaggtctcggtcagg

SEQ ID NO: 4266 - DNA, 23 bp, Artificial Sequence
  HLA-A targeting gRNA
cacaggggctaacacagcctggg

SEQ ID NO: 4267 - DNA, 23 bp, Artificial Sequence
  HLA-A targeting gRNA
cacaggggctaacgcagactggg

SEQ ID NO: 4268 - DNA, 23 bp, Artificial Sequence
  HLA-A targeting gRNA
cacaggggctaacgcagcctggg

SEQ ID NO: 4269 - DNA, 23 bp, Artificial Sequence
  HLA-A targeting gRNA
cacaggggctaatgcagcctggg

SEQ ID NO: 4270 - DNA, 23 bp, Artificial Sequence
  HLA-A targeting gRNA
cacagggtcccaggctgggatgg

SEQ ID NO: 4271 - DNA, 23 bp, Artificial Sequence
  HLA-A targeting gRNA
cacatcatccagaggatgtaagg

SEQ ID NO: 4272 - DNA, 23 bp, Artificial Sequence
  HLA-A targeting gRNA
cacatcatccagaggatgtacgg

SEQ ID NO: 4273 - DNA, 23 bp, Artificial Sequence
  HLA-A targeting gRNA
cacatcatccagaggatgtatgg

SEQ ID NO: 4274 - DNA, 23 bp, Artificial Sequence
  HLA-A targeting gRNA
cacatcatccaggtgatgtatgg

SEQ ID NO: 4275 - DNA, 23 bp, Artificial Sequence
  HLA-A targeting gRNA
cacatcatccggaggatgtatgg

SEQ ID NO: 4276 - DNA, 23 bp, Artificial Sequence
  HLA-A targeting gRNA
cacatcctccagaggatgtatgg

SEQ ID NO: 4277 - DNA, 23 bp, Artificial Sequence
  HLA-A targeting gRNA
cacatgccaggtacagcatgagg

SEQ ID NO: 4278 - DNA, 23 bp, Artificial Sequence
  HLA-A targeting gRNA
cacatgccatgtacagcatgagg

SEQ ID NO: 4279 - DNA, 23 bp, Artificial Sequence
  HLA-A targeting gRNA
cacatgggccatcccagcctggg

SEQ ID NO: 4280 - DNA, 23 bp, Artificial Sequence
  HLA-A targeting gRNA
caccagcccaggtctcggtcagg

SEQ ID NO: 4281 - DNA, 23 bp, Artificial Sequence
  HLA-A targeting gRNA
caccagcggacgcaggcacctgg

SEQ ID NO: 4282 - DNA, 23 bp, Artificial Sequence
  HLA-A targeting gRNA
caccagcggatgcaggcacctgg

SEQ ID NO: 4283 - DNA, 23 bp, Artificial Sequence
  HLA-A targeting gRNA
cacccaatgggagtgggaaatgg

SEQ ID NO: 4284 - DNA, 23 bp, Artificial Sequence
  HLA-A targeting gRNA
cacccaatgggagtgggaagtgg

SEQ ID NO: 4285 - DNA, 23 bp, Artificial Sequence
  HLA-A targeting gRNA
cacccaatgggagtgggaattgg

SEQ ID NO: 4286 - DNA, 23 bp, Artificial Sequence
  HLA-A targeting gRNA
cacccagcacaagttggaggcgg

SEQ ID NO: 4287 - DNA, 23 bp, Artificial Sequence
  HLA-A targeting gRNA
cacccagcccaagtgggaggcgg

SEQ ID NO: 4288 - DNA, 23 bp, Artificial Sequence
  HLA-A targeting gRNA
cacccagcccaagttggaggcgg

SEQ ID NO: 4289 - DNA, 23 bp, Artificial Sequence
  HLA-A targeting gRNA
cacccagcgcaaatgggaggcgg

SEQ ID NO: 4290 - DNA, 23 bp, Artificial Sequence
  HLA-A targeting gRNA
cacccagcgcaagttggaggcgg

SEQ ID NO: 4291 - DNA, 23 bp, Artificial Sequence
  HLA-A targeting gRNA
cacccagcgtaagtgggaggcgg

SEQ ID NO: 4292 - DNA, 23 bp, Artificial Sequence
  HLA-A targeting gRNA
cacccagctcaagtgggaggcgg

SEQ ID NO: 4293 - DNA, 23 bp, Artificial Sequence
  HLA-A targeting gRNA
cacccgacacccaatgggagtgg

SEQ ID NO: 4294 - DNA, 23 bp, Artificial Sequence
  HLA-A targeting gRNA
cacccgcccaggtctcggtcagg

SEQ ID NO: 4295 - DNA, 23 bp, Artificial Sequence
  HLA-A targeting gRNA
caccctgagatggagtaaggagg

SEQ ID NO: 4296 - DNA, 23 bp, Artificial Sequence
  HLA-A targeting gRNA
caccctgagctggggtaaggagg

SEQ ID NO: 4297 - DNA, 23 bp, Artificial Sequence
  HLA-A targeting gRNA
caccctgaggtgctgggccatgg

SEQ ID NO: 4298 - DNA, 23 bp, Artificial Sequence
  HLA-A targeting gRNA
caccgcagatacctgtggagtgg

SEQ ID NO: 4299 - DNA, 23 bp, Artificial Sequence
  HLA-A targeting gRNA
caccggcccaggtctcgatcagg

SEQ ID NO: 4300 - DNA, 23 bp, Artificial Sequence
  HLA-A targeting gRNA
caccggcccaggtctcggtcagg

SEQ ID NO: 4301 - DNA, 23 bp, Artificial Sequence
  HLA-A targeting gRNA
caccggtccaggtctcgatcagg

SEQ ID NO: 4302 - DNA, 23 bp, Artificial Sequence
  HLA-A targeting gRNA
caccgtagctgtggtcgctgtgg

SEQ ID NO: 4303 - DNA, 23 bp, Artificial Sequence
  HLA-A targeting gRNA
caccgtggtggttgtggtgttgg

SEQ ID NO: 4304 - DNA, 23 bp, Artificial Sequence
  HLA-A targeting gRNA
cacctcatggagtgggagcctgg

SEQ ID NO: 4305 - DNA, 23 bp, Artificial Sequence
  HLA-A targeting gRNA
cacctcccggcgcggctccccgg

SEQ ID NO: 4306 - DNA, 23 bp, Artificial Sequence
  HLA-A targeting gRNA
cacctccctgcgccgctccccgg

SEQ ID NO: 4307 - DNA, 23 bp, Artificial Sequence
  HLA-A targeting gRNA
cacctccctgcgcggctccccgg

SEQ ID NO: 4308 - DNA, 23 bp, Artificial Sequence
  HLA-A targeting gRNA
cacctcgatggttgtggtgttgg

SEQ ID NO: 4309 - DNA, 23 bp, Artificial Sequence
  HLA-A targeting gRNA
cacctcgttcctctccgcagagg

SEQ ID NO: 4310 - DNA, 23 bp, Artificial Sequence
  HLA-A targeting gRNA
cacctgggccatcccagcctggg

SEQ ID NO: 4311 - DNA, 23 bp, Artificial Sequence
  HLA-A targeting gRNA
caccttaatggttgtggtgttgg

SEQ ID NO: 4312 - DNA, 23 bp, Artificial Sequence
  HLA-A targeting gRNA
caccttcccctcctttcccaggg

SEQ ID NO: 4313 - DNA, 23 bp, Artificial Sequence
  HLA-A targeting gRNA
caccttgatattatggtgttggg

SEQ ID NO: 4314 - DNA, 23 bp, Artificial Sequence
  HLA-A targeting gRNA
caccttgatgattatggtgttgg

SEQ ID NO: 4315 - DNA, 23 bp, Artificial Sequence
  HLA-A targeting gRNA
caccttgatggttgtggtgttgg

SEQ ID NO: 4316 - DNA, 23 bp, Artificial Sequence
  HLA-A targeting gRNA
caccttggtggttgtggcgttgg

SEQ ID NO: 4317 - DNA, 23 bp, Artificial Sequence
  HLA-A targeting gRNA
caccttggtggttgtggtgttgg

SEQ ID NO: 4318 - DNA, 23 bp, Artificial Sequence
  HLA-A targeting gRNA
cacgaacgtgccctccaggtagg

SEQ ID NO: 4319 - DNA, 23 bp, Artificial Sequence
  HLA-A targeting gRNA
cacgagaagaagaggaaaatggg

SEQ ID NO: 4320 - DNA, 23 bp, Artificial Sequence
  HLA-A targeting gRNA
cacgagaagaggaggaaaatggg

SEQ ID NO: 4321 - DNA, 23 bp, Artificial Sequence
  HLA-A targeting gRNA
cacgaggaagggaggaaaatggg

SEQ ID NO: 4322 - DNA, 23 bp, Artificial Sequence
  HLA-A targeting gRNA
cacgaggaggggaggaaaatggg

SEQ ID NO: 4323 - DNA, 23 bp, Artificial Sequence
  HLA-A targeting gRNA
cacgatggggacagtggactggg

SEQ ID NO: 4324 - DNA, 23 bp, Artificial Sequence
  HLA-A targeting gRNA
cacgatggggacggtggactggg

SEQ ID NO: 4325 - DNA, 23 bp, Artificial Sequence
  HLA-A targeting gRNA
cacgatggggacggtggattggg

SEQ ID NO: 4326 - DNA, 23 bp, Artificial Sequence
  HLA-A targeting gRNA
cacgatggggatggtggactggg

SEQ ID NO: 4327 - DNA, 23 bp, Artificial Sequence
  HLA-A targeting gRNA
cacgcacagaccctccaggtagg

SEQ ID NO: 4328 - DNA, 23 bp, Artificial Sequence
  HLA-A targeting gRNA
cacgcacaggccctcccggtagg

SEQ ID NO: 4329 - DNA, 23 bp, Artificial Sequence
  HLA-A targeting gRNA
cacgcacgtgcccaccaggtagg

SEQ ID NO: 4330 - DNA, 23 bp, Artificial Sequence
  HLA-A targeting gRNA
cacgcacgtgccctccaggtggg

SEQ ID NO: 4331 - DNA, 23 bp, Artificial Sequence
  HLA-A targeting gRNA
cacgcacgtgtcctccaggtagg

SEQ ID NO: 4332 - DNA, 23 bp, Artificial Sequence
  HLA-A targeting gRNA
cacgcacgttccctccaggtagg

SEQ ID NO: 4333 - DNA, 23 bp, Artificial Sequence
  HLA-A targeting gRNA
cacgcactcgccctccaggcagg

SEQ ID NO: 4334 - DNA, 23 bp, Artificial Sequence
  HLA-A targeting gRNA
cacgcacttgccctccaggtagg

SEQ ID NO: 4335 - DNA, 23 bp, Artificial Sequence
  HLA-A targeting gRNA
cacgcgcgtgccctccaggtagg

SEQ ID NO: 4336 - DNA, 23 bp, Artificial Sequence
  HLA-A targeting gRNA
cacgcgggtaccaggggcagtgg

SEQ ID NO: 4337 - DNA, 23 bp, Artificial Sequence
  HLA-A targeting gRNA
cacgtacgtgccctccaggtagg

SEQ ID NO: 4338 - DNA, 23 bp, Artificial Sequence
  HLA-A targeting gRNA
cacgtcccggcccggccgcgggg

SEQ ID NO: 4339 - DNA, 23 bp, Artificial Sequence
  HLA-A targeting gRNA
cacgtgccatatgcagcacgagg

SEQ ID NO: 4340 - DNA, 23 bp, Artificial Sequence
  HLA-A targeting gRNA
cacgtgccatgtgcagcacgagg

SEQ ID NO: 4341 - DNA, 23 bp, Artificial Sequence
  HLA-A targeting gRNA
cacgtgccatgtgcagcatgagg

SEQ ID NO: 4342 - DNA, 23 bp, Artificial Sequence
  HLA-A targeting gRNA
cacgtgccatgttcagcacgagg

SEQ ID NO: 4343 - DNA, 23 bp, Artificial Sequence
  HLA-A targeting gRNA
cacgtgggccatcccagcctggg

SEQ ID NO: 4344 - DNA, 23 bp, Artificial Sequence
  HLA-A targeting gRNA
cactacaaccagagcgaggccgg

SEQ ID NO: 4345 - DNA, 23 bp, Artificial Sequence
  HLA-A targeting gRNA
cactcacgtgccctccaggtagg

SEQ ID NO: 4346 - DNA, 23 bp, Artificial Sequence
  HLA-A targeting gRNA
cactcagcgcaagttggaggcgg

SEQ ID NO: 4347 - DNA, 23 bp, Artificial Sequence
  HLA-A targeting gRNA
cactcggtcagtctgtgcctggg

SEQ ID NO: 4348 - DNA, 23 bp, Artificial Sequence
  HLA-A targeting gRNA
cactcggtcagtctgtgccttgg

SEQ ID NO: 4349 - DNA, 23 bp, Artificial Sequence
  HLA-A targeting gRNA
cactgacctggcagtgggatggg

SEQ ID NO: 4350 - DNA, 23 bp, Artificial Sequence
  HLA-A targeting gRNA
cactgatctggcagtgggatggg

SEQ ID NO: 4351 - DNA, 23 bp, Artificial Sequence
  HLA-A targeting gRNA
cactggagggtgtgagaccctgg

SEQ ID NO: 4352 - DNA, 23 bp, Artificial Sequence
  HLA-A targeting gRNA
cactgggagtttcaagccccagg

SEQ ID NO: 4353 - DNA, 23 bp, Artificial Sequence
  HLA-A targeting gRNA
cactggggaggcgccgcgttggg

SEQ ID NO: 4354 - DNA, 23 bp, Artificial Sequence
  HLA-A targeting gRNA
cactgggggtttcaagccccagg

SEQ ID NO: 4355 - DNA, 23 bp, Artificial Sequence
  HLA-A targeting gRNA
cacttctcccaacctgcgtcggg

SEQ ID NO: 4356 - DNA, 23 bp, Artificial Sequence
  HLA-A targeting gRNA
cacttcttctcccaacttgtggg

SEQ ID NO: 4357 - DNA, 23 bp, Artificial Sequence
  HLA-A targeting gRNA
cacttgtaaaggtgagattctgg

SEQ ID NO: 4358 - DNA, 23 bp, Artificial Sequence
  HLA-A targeting gRNA
cactttacctccactcagatcgg

SEQ ID NO: 4359 - DNA, 23 bp, Artificial Sequence
  HLA-A targeting gRNA
cagaaacgatgcccaagttgggg

SEQ ID NO: 4360 - DNA, 23 bp, Artificial Sequence
  HLA-A targeting gRNA
cagacacctgaagaatgggaagg

SEQ ID NO: 4361 - DNA, 23 bp, Artificial Sequence
  HLA-A targeting gRNA
cagacacctggagaacaggaagg

SEQ ID NO: 4362 - DNA, 23 bp, Artificial Sequence
  HLA-A targeting gRNA
cagacactttgcatctctcttgg

SEQ ID NO: 4363 - DNA, 23 bp, Artificial Sequence
  HLA-A targeting gRNA
cagacgccagcctggacacaggg

SEQ ID NO: 4364 - DNA, 23 bp, Artificial Sequence
  HLA-A targeting gRNA
cagagcccctcaccctgagatgg

SEQ ID NO: 4365 - DNA, 23 bp, Artificial Sequence
  HLA-A targeting gRNA
cagagtaagtgctagcacacagg

SEQ ID NO: 4366 - DNA, 23 bp, Artificial Sequence
  HLA-A targeting gRNA
cagagtaagtgctggcacacagg

SEQ ID NO: 4367 - DNA, 23 bp, Artificial Sequence
  HLA-A targeting gRNA
cagatacctgaagaaagggaagg

SEQ ID NO: 4368 - DNA, 23 bp, Artificial Sequence
  HLA-A targeting gRNA
cagatacctgaagaatgggaagg

SEQ ID NO: 4369 - DNA, 23 bp, Artificial Sequence
  HLA-A targeting gRNA
cagatacctggagaaagggaagg

SEQ ID NO: 4370 - DNA, 23 bp, Artificial Sequence
  HLA-A targeting gRNA
cagatacctggagaaccggaagg

SEQ ID NO: 4371 - DNA, 23 bp, Artificial Sequence
  HLA-A targeting gRNA
cagatacctggagaatgggaagg

SEQ ID NO: 4372 - DNA, 23 bp, Artificial Sequence
  HLA-A targeting gRNA
cagatatctggagaacgggaagg

SEQ ID NO: 4373 - DNA, 23 bp, Artificial Sequence
  HLA-A targeting gRNA
cagatcagtgtgatctccgcagg

SEQ ID NO: 4374 - DNA, 23 bp, Artificial Sequence
  HLA-A targeting gRNA
cagcaacaatgcccacgatgggg

SEQ ID NO: 4375 - DNA, 23 bp, Artificial Sequence
  HLA-A targeting gRNA
cagcaacgatgcccacgatgggg

SEQ ID NO: 4376 - DNA, 23 bp, Artificial Sequence
  HLA-A targeting gRNA
cagcaacgatgcccatgatgggg

SEQ ID NO: 4377 - DNA, 23 bp, Artificial Sequence
  HLA-A targeting gRNA
cagcagcgaccacagctcctagg

SEQ ID NO: 4378 - DNA, 23 bp, Artificial Sequence
  HLA-A targeting gRNA
cagcatcatgagtcaggggaagg

SEQ ID NO: 4379 - DNA, 23 bp, Artificial Sequence
  HLA-A targeting gRNA
cagcatgaggggcttcggtaagg

SEQ ID NO: 4380 - DNA, 23 bp, Artificial Sequence
  HLA-A targeting gRNA
cagcccaccatccccaacttggg

SEQ ID NO: 4381 - DNA, 23 bp, Artificial Sequence
  HLA-A targeting gRNA
cagcccaccatccccatcatggg

SEQ ID NO: 4382 - DNA, 23 bp, Artificial Sequence
  HLA-A targeting gRNA
cagcccggacgcaggcacctggg

SEQ ID NO: 4383 - DNA, 23 bp, Artificial Sequence
  HLA-A targeting gRNA
cagcctaccatccccatcatggg

SEQ ID NO: 4384 - DNA, 23 bp, Artificial Sequence
  HLA-A targeting gRNA
cagcctggacacagggacctggg

SEQ ID NO: 4385 - DNA, 23 bp, Artificial Sequence
  HLA-A targeting gRNA
cagcctggacgcaggcacctggg

SEQ ID NO: 4386 - DNA, 23 bp, Artificial Sequence
  HLA-A targeting gRNA
cagcgacgccgcgagtccgaggg

SEQ ID NO: 4387 - DNA, 23 bp, Artificial Sequence
  HLA-A targeting gRNA
cagcgcaagtgggaggcggccgg

SEQ ID NO: 4388 - DNA, 23 bp, Artificial Sequence
  HLA-A targeting gRNA
cagcggagaacctacctggaggg

SEQ ID NO: 4389 - DNA, 23 bp, Artificial Sequence
  HLA-A targeting gRNA
cagcggagagcctacctggaggg

SEQ ID NO: 4390 - DNA, 23 bp, Artificial Sequence
  HLA-A targeting gRNA
cagctaagagcctacctggaggg

SEQ ID NO: 4391 - DNA, 23 bp, Artificial Sequence
  HLA-A targeting gRNA
cagctactacaaccagagcgagg

SEQ ID NO: 4392 - DNA, 23 bp, Artificial Sequence
  HLA-A targeting gRNA
cagctgagaacctacctggaggg

SEQ ID NO: 4393 - DNA, 23 bp, Artificial Sequence
  HLA-A targeting gRNA
cagctgagagcctaccgggaggg

SEQ ID NO: 4394 - DNA, 23 bp, Artificial Sequence
  HLA-A targeting gRNA
cagctgagagcctacctggtggg

SEQ ID NO: 4395 - DNA, 23 bp, Artificial Sequence
  HLA-A targeting gRNA
cagctgagagcctgcctggaggg

SEQ ID NO: 4396 - DNA, 23 bp, Artificial Sequence
  HLA-A targeting gRNA
caggaagaaggacccgacgcagg

SEQ ID NO: 4397 - DNA, 23 bp, Artificial Sequence
  HLA-A targeting gRNA
caggaagaaggacccgtcgcagg

SEQ ID NO: 4398 - DNA, 23 bp, Artificial Sequence
  HLA-A targeting gRNA
caggacacctggggtagggaagg

SEQ ID NO: 4399 - DNA, 23 bp, Artificial Sequence
  HLA-A targeting gRNA
caggacacctggggtggggaagg

SEQ ID NO: 4400 - DNA, 23 bp, Artificial Sequence
  HLA-A targeting gRNA
caggacacctggtgtggggaagg

SEQ ID NO: 4401 - DNA, 23 bp, Artificial Sequence
  HLA-A targeting gRNA
caggacagagcctacctggaggg

SEQ ID NO: 4402 - DNA, 23 bp, Artificial Sequence
  HLA-A targeting gRNA
caggacccgggaagccgcgcagg

SEQ ID NO: 4403 - DNA, 23 bp, Artificial Sequence
  HLA-A targeting gRNA
caggacccggggagccgcgcagg

SEQ ID NO: 4404 - DNA, 23 bp, Artificial Sequence
  HLA-A targeting gRNA
caggacccggggagccgcgccgg

SEQ ID NO: 4405 - DNA, 23 bp, Artificial Sequence
  HLA-A targeting gRNA
caggacccggggagcggcgcagg

SEQ ID NO: 4406 - DNA, 23 bp, Artificial Sequence
  HLA-A targeting gRNA
caggacctgaggagccgcgccgg

SEQ ID NO: 4407 - DNA, 23 bp, Artificial Sequence
  HLA-A targeting gRNA
caggacgaagtcccaggccccgg

SEQ ID NO: 4408 - DNA, 23 bp, Artificial Sequence
  HLA-A targeting gRNA
caggacgaagtcccaggtcccgg

SEQ ID NO: 4409 - DNA, 23 bp, Artificial Sequence
  HLA-A targeting gRNA
caggacgaagtcccatgtcccgg

SEQ ID NO: 4410 - DNA, 23 bp, Artificial Sequence
  HLA-A targeting gRNA
caggccgggacacggaggtgtgg

SEQ ID NO: 4411 - DNA, 23 bp, Artificial Sequence
  HLA-A targeting gRNA
caggcgctttgcatctctcatgg

SEQ ID NO: 4412 - DNA, 23 bp, Artificial Sequence
  HLA-A targeting gRNA
caggcgctttgcatctttcatgg

SEQ ID NO: 4413 - DNA, 23 bp, Artificial Sequence
  HLA-A targeting gRNA
caggcgggggcgcaggacccggg

SEQ ID NO: 4414 - DNA, 23 bp, Artificial Sequence
  HLA-A targeting gRNA
caggcgggggctcaggacccggg

SEQ ID NO: 4415 - DNA, 23 bp, Artificial Sequence
  HLA-A targeting gRNA
caggctgcgtgtaagtgatgggg

SEQ ID NO: 4416 - DNA, 23 bp, Artificial Sequence
  HLA-A targeting gRNA
caggctgcgtgtaagtggtgggg

SEQ ID NO: 4417 - DNA, 23 bp, Artificial Sequence
  HLA-A targeting gRNA
cagggcaggatcaggaaacacgg

SEQ ID NO: 4418 - DNA, 23 bp, Artificial Sequence
  HLA-A targeting gRNA
cagggcaggatcaggaaacatgg

SEQ ID NO: 4419 - DNA, 23 bp, Artificial Sequence
  HLA-A targeting gRNA
cagggcggggcggggctcggggg

SEQ ID NO: 4420 - DNA, 23 bp, Artificial Sequence
  HLA-A targeting gRNA
cagggggcggatctcggacccgg

SEQ ID NO: 4421 - DNA, 23 bp, Artificial Sequence
  HLA-A targeting gRNA
caggggggtggtggggcagaggg

SEQ ID NO: 4422 - DNA, 23 bp, Artificial Sequence
  HLA-A targeting gRNA
cagggtctcacaccatccagagg

SEQ ID NO: 4423 - DNA, 23 bp, Artificial Sequence
  HLA-A targeting gRNA
cagggtctcacacccgccagagg

SEQ ID NO: 4424 - DNA, 23 bp, Artificial Sequence
  HLA-A targeting gRNA
cagggtctcacaccctccagagg

SEQ ID NO: 4425 - DNA, 23 bp, Artificial Sequence
  HLA-A targeting gRNA
cagggtctcacaccctccagcgg

SEQ ID NO: 4426 - DNA, 23 bp, Artificial Sequence
  HLA-A targeting gRNA
cagggtctcacaccctccagtgg

SEQ ID NO: 4427 - DNA, 23 bp, Artificial Sequence
  HLA-A targeting gRNA
cagggtctcacaccttccagagg

SEQ ID NO: 4428 - DNA, 23 bp, Artificial Sequence
  HLA-A targeting gRNA
cagggtctcacacttggcagagg

SEQ ID NO: 4429 - DNA, 23 bp, Artificial Sequence
  HLA-A targeting gRNA
cagggtctcacatcatccagagg

SEQ ID NO: 4430 - DNA, 23 bp, Artificial Sequence
  HLA-A targeting gRNA
cagggtctcacatcatccggagg

SEQ ID NO: 4431 - DNA, 23 bp, Artificial Sequence
  HLA-A targeting gRNA
cagggtctcacatcctccagagg

SEQ ID NO: 4432 - DNA, 23 bp, Artificial Sequence
  HLA-A targeting gRNA
cagggtctcataccctccagagg

SEQ ID NO: 4433 - DNA, 23 bp, Artificial Sequence
  HLA-A targeting gRNA
caggtaggctctcagctgctcgg

SEQ ID NO: 4434 - DNA, 23 bp, Artificial Sequence
  HLA-A targeting gRNA
caggtcagggctgaggcttgggg

SEQ ID NO: 4435 - DNA, 23 bp, Artificial Sequence
  HLA-A targeting gRNA
caggtcagtgtgatctccccagg

SEQ ID NO: 4436 - DNA, 23 bp, Artificial Sequence
  HLA-A targeting gRNA
caggtcagtgtgatctccgtagg

SEQ ID NO: 4437 - DNA, 23 bp, Artificial Sequence
  HLA-A targeting gRNA
caggtgtcccgtccattctcagg

SEQ ID NO: 4438 - DNA, 23 bp, Artificial Sequence
  HLA-A targeting gRNA
caggtgtcctgcccattctcagg

SEQ ID NO: 4439 - DNA, 23 bp, Artificial Sequence
  HLA-A targeting gRNA
caggtgtcctgtccattctcagg

SEQ ID NO: 4440 - DNA, 23 bp, Artificial Sequence
  HLA-A targeting gRNA
caggtgtcctgtccgttctcagg

SEQ ID NO: 4441 - DNA, 23 bp, Artificial Sequence
  HLA-A targeting gRNA
cagtccaccatccccatcgtggg

SEQ ID NO: 4442 - DNA, 23 bp, Artificial Sequence
  HLA-A targeting gRNA
cagtccaccgtccccatcgtggg

SEQ ID NO: 4443 - DNA, 23 bp, Artificial Sequence
  HLA-A targeting gRNA
cagtccactgtccccatcgtggg

SEQ ID NO: 4444 - DNA, 23 bp, Artificial Sequence
  HLA-A targeting gRNA
cagtccctagaatactgatcagg

SEQ ID NO: 4445 - DNA, 23 bp, Artificial Sequence
  HLA-A targeting gRNA
cagtccctaggatagtgatcagg

SEQ ID NO: 4446 - DNA, 23 bp, Artificial Sequence
  HLA-A targeting gRNA
cagtccctataatactgatcagg

SEQ ID NO: 4447 - DNA, 23 bp, Artificial Sequence
  HLA-A targeting gRNA
cagtccctggaatactgatcagg

SEQ ID NO: 4448 - DNA, 23 bp, Artificial Sequence
  HLA-A targeting gRNA
cagtgagtgaccccggcccgggg

SEQ ID NO: 4449 - DNA, 23 bp, Artificial Sequence
  HLA-A targeting gRNA
cagtgcagagcctacctggaggg

SEQ ID NO: 4450 - DNA, 23 bp, Artificial Sequence
  HLA-A targeting gRNA
cagtggacacaagggtgggctgg

SEQ ID NO: 4451 - DNA, 23 bp, Artificial Sequence
  HLA-A targeting gRNA
cagtggacacgggggtgggctgg

SEQ ID NO: 4452 - DNA, 23 bp, Artificial Sequence
  HLA-A targeting gRNA
cagtggagagcccacctggaggg

SEQ ID NO: 4453 - DNA, 23 bp, Artificial Sequence
  HLA-A targeting gRNA
cagtggagagtctacctggaggg

SEQ ID NO: 4454 - DNA, 23 bp, Artificial Sequence
  HLA-A targeting gRNA
cagtggccctgaccgagacctgg

SEQ ID NO: 4455 - DNA, 23 bp, Artificial Sequence
  HLA-A targeting gRNA
cagtggtcaaagtggtcaaaggg

SEQ ID NO: 4456 - DNA, 23 bp, Artificial Sequence
  HLA-A targeting gRNA
cagtggtcgaagtggtcaaaggg

SEQ ID NO: 4457 - DNA, 23 bp, Artificial Sequence
  HLA-A targeting gRNA
cagttcgcctacgacggcaaggg

SEQ ID NO: 4458 - DNA, 23 bp, Artificial Sequence
  HLA-A targeting gRNA
cataaccaggacgcctacgacgg

SEQ ID NO: 4459 - DNA, 23 bp, Artificial Sequence
  HLA-A targeting gRNA
cataaccagtacgcctacgacgg

SEQ ID NO: 4460 - DNA, 23 bp, Artificial Sequence
  HLA-A targeting gRNA
cataaccagtactcctacgacgg

SEQ ID NO: 4461 - DNA, 23 bp, Artificial Sequence
  HLA-A targeting gRNA
cataaccagttagcctacgacgg

SEQ ID NO: 4462 - DNA, 23 bp, Artificial Sequence
  HLA-A targeting gRNA
cataaccagttcgcctacgacgg

SEQ ID NO: 4463 - DNA, 23 bp, Artificial Sequence
  HLA-A targeting gRNA
cataaccagtttgcctacgacgg

SEQ ID NO: 4464 - DNA, 23 bp, Artificial Sequence
  HLA-A targeting gRNA
catacccgcggaggaggcgccgg

SEQ ID NO: 4465 - DNA, 23 bp, Artificial Sequence
  HLA-A targeting gRNA
cataccctccagaggatgtacgg

SEQ ID NO: 4466 - DNA, 23 bp, Artificial Sequence
  HLA-A targeting gRNA
catactgctcatacccgcggagg

SEQ ID NO: 4467 - DNA, 23 bp, Artificial Sequence
  HLA-A targeting gRNA
catagcccacggtgatgaagcgg

SEQ ID NO: 4468 - DNA, 23 bp, Artificial Sequence
  HLA-A targeting gRNA
catccagcgcaagtgggaggcgg

SEQ ID NO: 4469 - DNA, 23 bp, Artificial Sequence
  HLA-A targeting gRNA
catctcagggtgaggggctccgg

SEQ ID NO: 4470 - DNA, 23 bp, Artificial Sequence
  HLA-A targeting gRNA
catctcagggtgaggggctctgg

SEQ ID NO: 4471 - DNA, 23 bp, Artificial Sequence
  HLA-A targeting gRNA
catctcagggtgaggggcttcgg

SEQ ID NO: 4472 - DNA, 23 bp, Artificial Sequence
  HLA-A targeting gRNA
catctcagggtgaggggctttgg

SEQ ID NO: 4473 - DNA, 23 bp, Artificial Sequence
  HLA-A targeting gRNA
catctctcataggacaccctagg

SEQ ID NO: 4474 - DNA, 23 bp, Artificial Sequence
  HLA-A targeting gRNA
catctctcatggcacaccctagg

SEQ ID NO: 4475 - DNA, 23 bp, Artificial Sequence
  HLA-A targeting gRNA
catctctcatgggacaccctagg

SEQ ID NO: 4476 - DNA, 23 bp, Artificial Sequence
  HLA-A targeting gRNA
catctttcatgggacaccctagg

SEQ ID NO: 4477 - DNA, 23 bp, Artificial Sequence
  HLA-A targeting gRNA
catgaccagtacgcctacgacgg

SEQ ID NO: 4478 - DNA, 23 bp, Artificial Sequence
  HLA-A targeting gRNA
catgaccagtccgcctacgacgg

SEQ ID NO: 4479 - DNA, 23 bp, Artificial Sequence
  HLA-A targeting gRNA
catgaccagtccgcctaggacgg

SEQ ID NO: 4480 - DNA, 23 bp, Artificial Sequence
  HLA-A targeting gRNA
catgaccagtccgcctgcgacgg

SEQ ID NO: 4481 - DNA, 23 bp, Artificial Sequence
  HLA-A targeting gRNA
catgaccagttagcctacgacgg

SEQ ID NO: 4482 - DNA, 23 bp, Artificial Sequence
  HLA-A targeting gRNA
catgaccagttcgcctacgacgg

SEQ ID NO: 4483 - DNA, 23 bp, Artificial Sequence
  HLA-A targeting gRNA
catgacccggcccggccgcgggg

SEQ ID NO: 4484 - DNA, 23 bp, Artificial Sequence
  HLA-A targeting gRNA
catgaggggcttcggtaaggagg

SEQ ID NO: 4485 - DNA, 23 bp, Artificial Sequence
  HLA-A targeting gRNA
catgatggggatggtaggctggg

SEQ ID NO: 4486 - DNA, 23 bp, Artificial Sequence
  HLA-A targeting gRNA
catgatggggatggtgggctggg

SEQ ID NO: 4487 - DNA, 23 bp, Artificial Sequence
  HLA-A targeting gRNA
catgcacgtgccctccaggtagg

SEQ ID NO: 4488 - DNA, 23 bp, Artificial Sequence
  HLA-A targeting gRNA
catgccaggtacagcatgagggg

SEQ ID NO: 4489 - DNA, 23 bp, Artificial Sequence
  HLA-A targeting gRNA
catgccatgtacagcatgagggg

SEQ ID NO: 4490 - DNA, 23 bp, Artificial Sequence
  HLA-A targeting gRNA
catgctgcttcccagtaatgagg

SEQ ID NO: 4491 - DNA, 23 bp, Artificial Sequence
  HLA-A targeting gRNA
catggcccagcacctcagggtgg

SEQ ID NO: 4492 - DNA, 23 bp, Artificial Sequence
  HLA-A targeting gRNA
catgggcatcgttgctggcctgg

SEQ ID NO: 4493 - DNA, 23 bp, Artificial Sequence
  HLA-A targeting gRNA
catggtcagagacgagatggtgg

SEQ ID NO: 4494 - DNA, 23 bp, Artificial Sequence
  HLA-A targeting gRNA
catggtcagagacgggatggtgg

SEQ ID NO: 4495 - DNA, 23 bp, Artificial Sequence
  HLA-A targeting gRNA
catggtcagagacggggtggtgg

SEQ ID NO: 4496 - DNA, 23 bp, Artificial Sequence
  HLA-A targeting gRNA
catggtcagagagggggtggtgg

SEQ ID NO: 4497 - DNA, 23 bp, Artificial Sequence
  HLA-A targeting gRNA
catggtcagagatgggatggtgg

SEQ ID NO: 4498 - DNA, 23 bp, Artificial Sequence
  HLA-A targeting gRNA
catgtcccggcccggccgtgggg

SEQ ID NO: 4499 - DNA, 23 bp, Artificial Sequence
  HLA-A targeting gRNA
catgtcccggcccggctgcgggg

SEQ ID NO: 4500 - DNA, 23 bp, Artificial Sequence
  HLA-A targeting gRNA
catgtcccggcctggccgcgggg

SEQ ID NO: 4501 - DNA, 23 bp, Artificial Sequence
  HLA-A targeting gRNA
catgtgaccagcctgagaatggg

SEQ ID NO: 4502 - DNA, 23 bp, Artificial Sequence
  HLA-A targeting gRNA
cattctcaggatagtcacatggg

SEQ ID NO: 4503 - DNA, 23 bp, Artificial Sequence
  HLA-A targeting gRNA
cattctcaggatggtcacatggg

SEQ ID NO: 4504 - DNA, 23 bp, Artificial Sequence
  HLA-A targeting gRNA
cattctcaggctggtcacatggg

SEQ ID NO: 4505 - DNA, 23 bp, Artificial Sequence
  HLA-A targeting gRNA
cattggggaggcgcagcattggg

SEQ ID NO: 4506 - DNA, 23 bp, Artificial Sequence
  HLA-A targeting gRNA
cattggggaggcgcagcgttggg

SEQ ID NO: 4507 - DNA, 23 bp, Artificial Sequence
  HLA-A targeting gRNA
cattggggaggcgccgcgttggg

SEQ ID NO: 4508 - DNA, 23 bp, Artificial Sequence
  HLA-A targeting gRNA
cattttcctcccctcctcgtggg

SEQ ID NO: 4509 - DNA, 23 bp, Artificial Sequence
  HLA-A targeting gRNA
cattttcctcccttcctcgtggg

SEQ ID NO: 4510 - DNA, 23 bp, Artificial Sequence
  HLA-A targeting gRNA
cattttcctcctcttctcgtggg

SEQ ID NO: 4511 - DNA, 23 bp, Artificial Sequence
  HLA-A targeting gRNA
cattttcctcttcttctcgtggg

SEQ ID NO: 4512 - DNA, 23 bp, Artificial Sequence
  HLA-A targeting gRNA
cattttcctcttcttctcgttgg

SEQ ID NO: 4513 - DNA, 23 bp, Artificial Sequence
  HLA-A targeting gRNA
ccaaacaccagcctggacgcagg

SEQ ID NO: 4514 - DNA, 23 bp, Artificial Sequence
  HLA-A targeting gRNA
ccaaacccctcaccctgagatgg

SEQ ID NO: 4515 - DNA, 23 bp, Artificial Sequence
  HLA-A targeting gRNA
ccaaccccgacgtacggcccggg

SEQ ID NO: 4516 - DNA, 23 bp, Artificial Sequence
  HLA-A targeting gRNA
ccaagggccgtgtctgcactggg

SEQ ID NO: 4517 - DNA, 23 bp, Artificial Sequence
  HLA-A targeting gRNA
ccaagggccgtgtctgcattggg

SEQ ID NO: 4518 - DNA, 23 bp, Artificial Sequence
  HLA-A targeting gRNA
ccaagttggggatggtgggctgg

SEQ ID NO: 4519 - DNA, 23 bp, Artificial Sequence
  HLA-A targeting gRNA
ccaatccaccgtccccatcgtgg

SEQ ID NO: 4520 - DNA, 23 bp, Artificial Sequence
  HLA-A targeting gRNA
ccaatgggagtgggaattggggg

SEQ ID NO: 4521 - DNA, 23 bp, Artificial Sequence
  HLA-A targeting gRNA
ccacaactgctaggacagccagg

SEQ ID NO: 4522 - DNA, 23 bp, Artificial Sequence
  HLA-A targeting gRNA
ccacagctacggtgaccacaagg

SEQ ID NO: 4523 - DNA, 23 bp, Artificial Sequence
  HLA-A targeting gRNA
ccacagctccaaggacagctagg

SEQ ID NO: 4524 - DNA, 23 bp, Artificial Sequence
  HLA-A targeting gRNA
ccacagctcctaggacagctagg

SEQ ID NO: 4525 - DNA, 23 bp, Artificial Sequence
  HLA-A targeting gRNA
ccaccacagctgtccacttctgg

SEQ ID NO: 4526 - DNA, 23 bp, Artificial Sequence
  HLA-A targeting gRNA
ccaccccctctctgaccatgagg

SEQ ID NO: 4527 - DNA, 23 bp, Artificial Sequence
  HLA-A targeting gRNA
ccaccccgtctctgaccatgagg

SEQ ID NO: 4528 - DNA, 23 bp, Artificial Sequence
  HLA-A targeting gRNA
ccacctggagggcacgtgcgtgg

SEQ ID NO: 4529 - DNA, 23 bp, Artificial Sequence
  HLA-A targeting gRNA
ccacgagaagaagaggaaaatgg

SEQ ID NO: 4530 - DNA, 23 bp, Artificial Sequence
  HLA-A targeting gRNA
ccacgagaagaggaggaaaatgg

SEQ ID NO: 4531 - DNA, 23 bp, Artificial Sequence
  HLA-A targeting gRNA
ccacgaggaagggaggaaaatgg

SEQ ID NO: 4532 - DNA, 23 bp, Artificial Sequence
  HLA-A targeting gRNA
ccacgaggaggggaggaaaatgg

SEQ ID NO: 4533 - DNA, 23 bp, Artificial Sequence
  HLA-A targeting gRNA
ccacgatggggacagtggactgg

SEQ ID NO: 4534 - DNA, 23 bp, Artificial Sequence
  HLA-A targeting gRNA
ccacgatggggacggtggactgg

SEQ ID NO: 4535 - DNA, 23 bp, Artificial Sequence
  HLA-A targeting gRNA
ccacgatggggacggtggattgg

SEQ ID NO: 4536 - DNA, 23 bp, Artificial Sequence
  HLA-A targeting gRNA
ccacgatggggatggtggactgg

SEQ ID NO: 4537 - DNA, 23 bp, Artificial Sequence
  HLA-A targeting gRNA
ccacgcacgtgccctccaggtgg

SEQ ID NO: 4538 - DNA, 23 bp, Artificial Sequence
  HLA-A targeting gRNA
ccacgccgcgagtccgaggacgg

SEQ ID NO: 4539 - DNA, 23 bp, Artificial Sequence
  HLA-A targeting gRNA
ccacggaggaggcgcccgtccgg

SEQ ID NO: 4540 - DNA, 23 bp, Artificial Sequence
  HLA-A targeting gRNA
ccacgtcccggcccggccgcggg

SEQ ID NO: 4541 - DNA, 23 bp, Artificial Sequence
  HLA-A targeting gRNA
ccactgcagcagctgtggtcagg

SEQ ID NO: 4542 - DNA, 23 bp, Artificial Sequence
  HLA-A targeting gRNA
ccactgccccccagagcagcagg

SEQ ID NO: 4543 - DNA, 23 bp, Artificial Sequence
  HLA-A targeting gRNA
ccactgccccctagagcagcagg

SEQ ID NO: 4544 - DNA, 23 bp, Artificial Sequence
  HLA-A targeting gRNA
ccactgcggcagctgtggtcagg

SEQ ID NO: 4545 - DNA, 23 bp, Artificial Sequence
  HLA-A targeting gRNA
ccactggggtttcaagccccagg

SEQ ID NO: 4546 - DNA, 23 bp, Artificial Sequence
  HLA-A targeting gRNA
ccagaaacgatgcccaagttggg

SEQ ID NO: 4547 - DNA, 23 bp, Artificial Sequence
  HLA-A targeting gRNA
ccagaagtggacagctgtggtgg

SEQ ID NO: 4548 - DNA, 23 bp, Artificial Sequence
  HLA-A targeting gRNA
ccagaagtgggcagctgtgatgg

SEQ ID NO: 4549 - DNA, 23 bp, Artificial Sequence
  HLA-A targeting gRNA
ccagacaccagcccggacgcagg

SEQ ID NO: 4550 - DNA, 23 bp, Artificial Sequence
  HLA-A targeting gRNA
ccagacaccagcctggacgcagg

SEQ ID NO: 4551 - DNA, 23 bp, Artificial Sequence
  HLA-A targeting gRNA
ccagacgccagcctggacacagg

SEQ ID NO: 4552 - DNA, 23 bp, Artificial Sequence
  HLA-A targeting gRNA
ccagcaacaatgcccacgatggg

SEQ ID NO: 4553 - DNA, 23 bp, Artificial Sequence
  HLA-A targeting gRNA
ccagcaacgatgcccacgatggg

SEQ ID NO: 4554 - DNA, 23 bp, Artificial Sequence
  HLA-A targeting gRNA
ccagcaacgatgcccatgatggg

SEQ ID NO: 4555 - DNA, 23 bp, Artificial Sequence
  HLA-A targeting gRNA
ccagccagcaacagtgcccaggg

SEQ ID NO: 4556 - DNA, 23 bp, Artificial Sequence
  HLA-A targeting gRNA
ccagccagcgacagtgcccaggg

SEQ ID NO: 4557 - DNA, 23 bp, Artificial Sequence
  HLA-A targeting gRNA
ccagcccaccatccccaacttgg

SEQ ID NO: 4558 - DNA, 23 bp, Artificial Sequence
  HLA-A targeting gRNA
ccagcccaccatccccatcatgg

SEQ ID NO: 4559 - DNA, 23 bp, Artificial Sequence
  HLA-A targeting gRNA
ccagccccgaccaacccgcgggg

SEQ ID NO: 4560 - DNA, 23 bp, Artificial Sequence
  HLA-A targeting gRNA
ccagcccggacgcaggcacctgg

SEQ ID NO: 4561 - DNA, 23 bp, Artificial Sequence
  HLA-A targeting gRNA
ccagccgtacatcctctggaggg

SEQ ID NO: 4562 - DNA, 23 bp, Artificial Sequence
  HLA-A targeting gRNA
ccagcctaccatccccatcatgg

SEQ ID NO: 4563 - DNA, 23 bp, Artificial Sequence
  HLA-A targeting gRNA
ccagcctggacacagggacctgg

SEQ ID NO: 4564 - DNA, 23 bp, Artificial Sequence
  HLA-A targeting gRNA
ccagcctggacgcaggcacctgg

SEQ ID NO: 4565 - DNA, 23 bp, Artificial Sequence
  HLA-A targeting gRNA
ccaggacagccaggacagccagg

SEQ ID NO: 4566 - DNA, 23 bp, Artificial Sequence
  HLA-A targeting gRNA
ccaggacagccaggacagctggg

SEQ ID NO: 4567 - DNA, 23 bp, Artificial Sequence
  HLA-A targeting gRNA
ccaggacgcctacgacggcaagg

SEQ ID NO: 4568 - DNA, 23 bp, Artificial Sequence
  HLA-A targeting gRNA
ccaggactcccgagagcagcagg

SEQ ID NO: 4569 - DNA, 23 bp, Artificial Sequence
  HLA-A targeting gRNA
ccaggcacagactgaccgagagg

SEQ ID NO: 4570 - DNA, 23 bp, Artificial Sequence
  HLA-A targeting gRNA
ccaggcagcaacagtgcccaggg

SEQ ID NO: 4571 - DNA, 23 bp, Artificial Sequence
  HLA-A targeting gRNA
ccaggcagcgacagtgcccaggg

SEQ ID NO: 4572 - DNA, 23 bp, Artificial Sequence
  HLA-A targeting gRNA
ccaggcctcccgagagcagcagg

SEQ ID NO: 4573 - DNA, 23 bp, Artificial Sequence
  HLA-A targeting gRNA
ccagggccccccagagcagcagg

SEQ ID NO: 4574 - DNA, 23 bp, Artificial Sequence
  HLA-A targeting gRNA
ccagggccgccgagagcagcagg

SEQ ID NO: 4575 - DNA, 23 bp, Artificial Sequence
  HLA-A targeting gRNA
ccagggccgtgtctgcattgggg

SEQ ID NO: 4576 - DNA, 23 bp, Artificial Sequence
  HLA-A targeting gRNA
ccagggctcccgagagcagcagg

SEQ ID NO: 4577 - DNA, 23 bp, Artificial Sequence
  HLA-A targeting gRNA
ccaggtcagggctgaggcttggg

SEQ ID NO: 4578 - DNA, 23 bp, Artificial Sequence
  HLA-A targeting gRNA
ccaggtccctgtgtccaggctgg

SEQ ID NO: 4579 - DNA, 23 bp, Artificial Sequence
  HLA-A targeting gRNA
ccaggtctcgatcagggccaggg

SEQ ID NO: 4580 - DNA, 23 bp, Artificial Sequence
  HLA-A targeting gRNA
ccaggtctcggtcagggccaggg

SEQ ID NO: 4581 - DNA, 23 bp, Artificial Sequence
  HLA-A targeting gRNA
ccaggtgcctgcgtccaggctgg

SEQ ID NO: 4582 - DNA, 23 bp, Artificial Sequence
  HLA-A targeting gRNA
ccaggtgcctgcgtccgggctgg

SEQ ID NO: 4583 - DNA, 23 bp, Artificial Sequence
  HLA-A targeting gRNA
ccagtacgcctacgacggcaggg

SEQ ID NO: 4584 - DNA, 23 bp, Artificial Sequence
  HLA-A targeting gRNA
ccagtactcctacgacggcaagg

SEQ ID NO: 4585 - DNA, 23 bp, Artificial Sequence
  HLA-A targeting gRNA
ccagtccaccatccccatcgtgg

SEQ ID NO: 4586 - DNA, 23 bp, Artificial Sequence
  HLA-A targeting gRNA
ccagtccaccgtccccatcgtgg

SEQ ID NO: 4587 - DNA, 23 bp, Artificial Sequence
  HLA-A targeting gRNA
ccagtccactgtccccatcgtgg

SEQ ID NO: 4588 - DNA, 23 bp, Artificial Sequence
  HLA-A targeting gRNA
ccagtcccgaccaacccgcgggg

SEQ ID NO: 4589 - DNA, 23 bp, Artificial Sequence
  HLA-A targeting gRNA
ccagtccgcctaagacggcaagg

SEQ ID NO: 4590 - DNA, 23 bp, Artificial Sequence
  HLA-A targeting gRNA
ccagtccgcctacgacggcaagg

SEQ ID NO: 4591 - DNA, 23 bp, Artificial Sequence
  HLA-A targeting gRNA
ccagtccgcctaggacggcaagg

SEQ ID NO: 4592 - DNA, 23 bp, Artificial Sequence
  HLA-A targeting gRNA
ccagtccgcctgcgacggcaagg

SEQ ID NO: 4593 - DNA, 23 bp, Artificial Sequence
  HLA-A targeting gRNA
ccagtgagtgaccccggcccggg

SEQ ID NO: 4594 - DNA, 23 bp, Artificial Sequence
  HLA-A targeting gRNA
ccagttagcctacgacggcaagg

SEQ ID NO: 4595 - DNA, 23 bp, Artificial Sequence
  HLA-A targeting gRNA
ccagttcgcctacgatggcaagg

SEQ ID NO: 4596 - DNA, 23 bp, Artificial Sequence
  HLA-A targeting gRNA
ccagtttgcctacgacggcaagg

SEQ ID NO: 4597 - DNA, 23 bp, Artificial Sequence
  HLA-A targeting gRNA
ccatagctcctaggacagctagg

SEQ ID NO: 4598 - DNA, 23 bp, Artificial Sequence
  HLA-A targeting gRNA
ccatcacagctgcccacttctgg

SEQ ID NO: 4599 - DNA, 23 bp, Artificial Sequence
  HLA-A targeting gRNA
ccatcccatctctgaccatgagg

SEQ ID NO: 4600 - DNA, 23 bp, Artificial Sequence
  HLA-A targeting gRNA
ccatcccccacggacggcccggg

SEQ ID NO: 4601 - DNA, 23 bp, Artificial Sequence
  HLA-A targeting gRNA
ccatcccccacgtacggcccggg

SEQ ID NO: 4602 - DNA, 23 bp, Artificial Sequence
  HLA-A targeting gRNA
ccatcccccacgtacggccgggg

SEQ ID NO: 4603 - DNA, 23 bp, Artificial Sequence
  HLA-A targeting gRNA
ccatcccgtctctgaccatgagg

SEQ ID NO: 4604 - DNA, 23 bp, Artificial Sequence
  HLA-A targeting gRNA
ccatctcagggtgaggggtttgg

SEQ ID NO: 4605 - DNA, 23 bp, Artificial Sequence
  HLA-A targeting gRNA
ccatctcccgtagatctcccggg

SEQ ID NO: 4606 - DNA, 23 bp, Artificial Sequence
  HLA-A targeting gRNA
ccatctcctatagatcgcccggg

SEQ ID NO: 4607 - DNA, 23 bp, Artificial Sequence
  HLA-A targeting gRNA
ccatctcctatagatctcccggg

SEQ ID NO: 4608 - DNA, 23 bp, Artificial Sequence
  HLA-A targeting gRNA
ccatctcctataggtcgccgggg

SEQ ID NO: 4609 - DNA, 23 bp, Artificial Sequence
  HLA-A targeting gRNA
ccatctcctgtagatctcccggg

SEQ ID NO: 4610 - DNA, 23 bp, Artificial Sequence
  HLA-A targeting gRNA
ccatctcgtctctgaccatgagg

SEQ ID NO: 4611 - DNA, 23 bp, Artificial Sequence
  HLA-A targeting gRNA
ccatgacccggcccggccgcggg

SEQ ID NO: 4612 - DNA, 23 bp, Artificial Sequence
  HLA-A targeting gRNA
ccatgatggggatggtaggctgg

SEQ ID NO: 4613 - DNA, 23 bp, Artificial Sequence
  HLA-A targeting gRNA
ccatgatggggatggtgggctgg

SEQ ID NO: 4614 - DNA, 23 bp, Artificial Sequence
  HLA-A targeting gRNA
ccatgtcccggcccggccgtggg

SEQ ID NO: 4615 - DNA, 23 bp, Artificial Sequence
  HLA-A targeting gRNA
ccatgtcccggcccggctgcggg

SEQ ID NO: 4616 - DNA, 23 bp, Artificial Sequence
  HLA-A targeting gRNA
ccatgtcccggcctggccgcggg

SEQ ID NO: 4617 - DNA, 23 bp, Artificial Sequence
  HLA-A targeting gRNA
ccatgtgaccagcctgagaatgg

SEQ ID NO: 4618 - DNA, 23 bp, Artificial Sequence
  HLA-A targeting gRNA
ccatgtgaccatcctgagaacgg

SEQ ID NO: 4619 - DNA, 23 bp, Artificial Sequence
  HLA-A targeting gRNA
ccatgtgaccatcctgagaatgg

SEQ ID NO: 4620 - DNA, 23 bp, Artificial Sequence
  HLA-A targeting gRNA
ccatgtgactatcctgagaatgg

SEQ ID NO: 4621 - DNA, 23 bp, Artificial Sequence
  HLA-A targeting gRNA
ccattctcaggatagtcacatgg

SEQ ID NO: 4622 - DNA, 23 bp, Artificial Sequence
  HLA-A targeting gRNA
ccattctcaggatggtcacatgg

SEQ ID NO: 4623 - DNA, 23 bp, Artificial Sequence
  HLA-A targeting gRNA
ccattctcaggctggtcacatgg

SEQ ID NO: 4624 - DNA, 23 bp, Artificial Sequence
  HLA-A targeting gRNA
ccattttcctcccctcctcgtgg

SEQ ID NO: 4625 - DNA, 23 bp, Artificial Sequence
  HLA-A targeting gRNA
ccattttcctcccttcctcgtgg

SEQ ID NO: 4626 - DNA, 23 bp, Artificial Sequence
  HLA-A targeting gRNA
ccattttcctcctcttctcgtgg

SEQ ID NO: 4627 - DNA, 23 bp, Artificial Sequence
  HLA-A targeting gRNA
ccattttcctcttcttctcgtgg

SEQ ID NO: 4628 - DNA, 23 bp, Artificial Sequence
  HLA-A targeting gRNA
cccaaccccgacgtacggcccgg

SEQ ID NO: 4629 - DNA, 23 bp, Artificial Sequence
  HLA-A targeting gRNA
cccaacttgggcatcgtttctgg

SEQ ID NO: 4630 - DNA, 23 bp, Artificial Sequence
  HLA-A targeting gRNA
cccaagcctcagccctgacccgg

SEQ ID NO: 4631 - DNA, 23 bp, Artificial Sequence
  HLA-A targeting gRNA
cccaagcctcagccctgacctgg

SEQ ID NO: 4632 - DNA, 23 bp, Artificial Sequence
  HLA-A targeting gRNA
cccaatgcagacaaggctctcgg

SEQ ID NO: 4633 - DNA, 23 bp, Artificial Sequence
  HLA-A targeting gRNA
cccaatgcagacacggccctggg

SEQ ID NO: 4634 - DNA, 23 bp, Artificial Sequence
  HLA-A targeting gRNA
cccaatgcagacacggcccttgg

SEQ ID NO: 4635 - DNA, 23 bp, Artificial Sequence
  HLA-A targeting gRNA
cccaatgcagacgcggccctcgg

SEQ ID NO: 4636 - DNA, 23 bp, Artificial Sequence
  HLA-A targeting gRNA
cccaatgggagtgggaaatgggg

SEQ ID NO: 4637 - DNA, 23 bp, Artificial Sequence
  HLA-A targeting gRNA
cccaatgggagtgggaagtgggg

SEQ ID NO: 4638 - DNA, 23 bp, Artificial Sequence
  HLA-A targeting gRNA
cccaatgggagtgggaattgggg

SEQ ID NO: 4639 - DNA, 23 bp, Artificial Sequence
  HLA-A targeting gRNA
cccacacaggcagctgtctcagg

SEQ ID NO: 4640 - DNA, 23 bp, Artificial Sequence
  HLA-A targeting gRNA
cccacggccgggccgggacatgg

SEQ ID NO: 4641 - DNA, 23 bp, Artificial Sequence
  HLA-A targeting gRNA
cccacgggcgcctcctccgcggg

SEQ ID NO: 4642 - DNA, 23 bp, Artificial Sequence
  HLA-A targeting gRNA
cccagccagcaacagtgcccagg

SEQ ID NO: 4643 - DNA, 23 bp, Artificial Sequence
  HLA-A targeting gRNA
cccagccccgaccaacccgcggg

SEQ ID NO: 4644 - DNA, 23 bp, Artificial Sequence
  HLA-A targeting gRNA
cccagccgtacatcctctggagg

SEQ ID NO: 4645 - DNA, 23 bp, Artificial Sequence
  HLA-A targeting gRNA
cccagctgtcctggctgtcctgg

SEQ ID NO: 4646 - DNA, 23 bp, Artificial Sequence
  HLA-A targeting gRNA
cccaggcagcaacagtgcccagg

SEQ ID NO: 4647 - DNA, 23 bp, Artificial Sequence
  HLA-A targeting gRNA
cccaggccggggtcactcaccgg

SEQ ID NO: 4648 - DNA, 23 bp, Artificial Sequence
  HLA-A targeting gRNA
cccagggccgtgtctgcattggg

SEQ ID NO: 4649 - DNA, 23 bp, Artificial Sequence
  HLA-A targeting gRNA
cccaggtctcgatcagggccagg

SEQ ID NO: 4650 - DNA, 23 bp, Artificial Sequence
  HLA-A targeting gRNA
cccaggtctcggtcagggccagg

SEQ ID NO: 4651 - DNA, 23 bp, Artificial Sequence
  HLA-A targeting gRNA
cccagtcacccacccggactcgg

SEQ ID NO: 4652 - DNA, 23 bp, Artificial Sequence
  HLA-A targeting gRNA
cccagtcccgaccaacccgcggg

SEQ ID NO: 4653 - DNA, 23 bp, Artificial Sequence
  HLA-A targeting gRNA
cccagtgcagacacggcccttgg

SEQ ID NO: 4654 - DNA, 23 bp, Artificial Sequence
  HLA-A targeting gRNA
cccatcatgggcatcgttgctgg

SEQ ID NO: 4655 - DNA, 23 bp, Artificial Sequence
  HLA-A targeting gRNA
cccatcccccacggacggcccgg

SEQ ID NO: 4656 - DNA, 23 bp, Artificial Sequence
  HLA-A targeting gRNA
cccatcccccacgtacggcccgg

SEQ ID NO: 4657 - DNA, 23 bp, Artificial Sequence
  HLA-A targeting gRNA
cccatcccccacgtacggccggg

SEQ ID NO: 4658 - DNA, 23 bp, Artificial Sequence
  HLA-A targeting gRNA
cccatcgtgggcatcgttgctgg

SEQ ID NO: 4659 - DNA, 23 bp, Artificial Sequence
  HLA-A targeting gRNA
cccatcgtgggcattgttgctgg

SEQ ID NO: 4660 - DNA, 23 bp, Artificial Sequence
  HLA-A targeting gRNA
cccatctcccgtagatctcccgg

SEQ ID NO: 4661 - DNA, 23 bp, Artificial Sequence
  HLA-A targeting gRNA
cccatctcctatagatcgcccgg

SEQ ID NO: 4662 - DNA, 23 bp, Artificial Sequence
  HLA-A targeting gRNA
cccatctcctatagatctcccgg

SEQ ID NO: 4663 - DNA, 23 bp, Artificial Sequence
  HLA-A targeting gRNA
cccatctcctataggtcgccggg

SEQ ID NO: 4664 - DNA, 23 bp, Artificial Sequence
  HLA-A targeting gRNA
cccatctcctgtagatctcccgg

SEQ ID NO: 4665 - DNA, 23 bp, Artificial Sequence
  HLA-A targeting gRNA
cccattctccattcaagggaggg

SEQ ID NO: 4666 - DNA, 23 bp, Artificial Sequence
  HLA-A targeting gRNA
cccattgcagacgcggccctcgg

SEQ ID NO: 4667 - DNA, 23 bp, Artificial Sequence
  HLA-A targeting gRNA
cccattttccattcaagggaggg

SEQ ID NO: 4668 - DNA, 23 bp, Artificial Sequence
  HLA-A targeting gRNA
ccccaaacacactgagtgtgagg

SEQ ID NO: 4669 - DNA, 23 bp, Artificial Sequence
  HLA-A targeting gRNA
ccccaacaccacaaccaccaagg

SEQ ID NO: 4670 - DNA, 23 bp, Artificial Sequence
  HLA-A targeting gRNA
ccccaacaccacaaccaccacgg

SEQ ID NO: 4671 - DNA, 23 bp, Artificial Sequence
  HLA-A targeting gRNA
ccccaacaccacaaccatcaagg

SEQ ID NO: 4672 - DNA, 23 bp, Artificial Sequence
  HLA-A targeting gRNA
ccccaacaccacaaccatcgagg

SEQ ID NO: 4673 - DNA, 23 bp, Artificial Sequence
  HLA-A targeting gRNA
ccccaacaccacaaccattaagg

SEQ ID NO: 4674 - DNA, 23 bp, Artificial Sequence
  HLA-A targeting gRNA
ccccaacaccataatcatcaagg

SEQ ID NO: 4675 - DNA, 23 bp, Artificial Sequence
  HLA-A targeting gRNA
ccccaacgccacaaccaccaagg

SEQ ID NO: 4676 - DNA, 23 bp, Artificial Sequence
  HLA-A targeting gRNA
ccccaatgcagacacggccctgg

SEQ ID NO: 4677 - DNA, 23 bp, Artificial Sequence
  HLA-A targeting gRNA
ccccaattcccactcccattggg

SEQ ID NO: 4678 - DNA, 23 bp, Artificial Sequence
  HLA-A targeting gRNA
ccccacgggcgcctcctccgcgg

SEQ ID NO: 4679 - DNA, 23 bp, Artificial Sequence
  HLA-A targeting gRNA
ccccacttcccactcccattggg

SEQ ID NO: 4680 - DNA, 23 bp, Artificial Sequence
  HLA-A targeting gRNA
ccccagccccgaccaacccgcgg

SEQ ID NO: 4681 - DNA, 23 bp, Artificial Sequence
  HLA-A targeting gRNA
ccccaggctcccactccttgagg

SEQ ID NO: 4682 - DNA, 23 bp, Artificial Sequence
  HLA-A targeting gRNA
ccccaggctcccacttcatgagg

SEQ ID NO: 4683 - DNA, 23 bp, Artificial Sequence
  HLA-A targeting gRNA
ccccaggctccctctccatgagg

SEQ ID NO: 4684 - DNA, 23 bp, Artificial Sequence
  HLA-A targeting gRNA
ccccaggcttccactccatgagg

SEQ ID NO: 4685 - DNA, 23 bp, Artificial Sequence
  HLA-A targeting gRNA
ccccaggttcccactccatgagg

SEQ ID NO: 4686 - DNA, 23 bp, Artificial Sequence
  HLA-A targeting gRNA
ccccagtcccgaccaacccgcgg

SEQ ID NO: 4687 - DNA, 23 bp, Artificial Sequence
  HLA-A targeting gRNA
ccccagtctcccactccatgagg

SEQ ID NO: 4688 - DNA, 23 bp, Artificial Sequence
  HLA-A targeting gRNA
ccccatcccccacgtacggccgg

SEQ ID NO: 4689 - DNA, 23 bp, Artificial Sequence
  HLA-A targeting gRNA
ccccatctcctataggtcgccgg

SEQ ID NO: 4690 - DNA, 23 bp, Artificial Sequence
  HLA-A targeting gRNA
ccccatttcccactcccattggg

SEQ ID NO: 4691 - DNA, 23 bp, Artificial Sequence
  HLA-A targeting gRNA
cccccaattcccactcccattgg

SEQ ID NO: 4692 - DNA, 23 bp, Artificial Sequence
  HLA-A targeting gRNA
cccccagagcagcaggaggacgg

SEQ ID NO: 4693 - DNA, 23 bp, Artificial Sequence
  HLA-A targeting gRNA
cccccagagcagcaggaggaggg

SEQ ID NO: 4694 - DNA, 23 bp, Artificial Sequence
  HLA-A targeting gRNA
ccccccagagcagcaggaggagg

SEQ ID NO: 4695 - DNA, 23 bp, Artificial Sequence
  HLA-A targeting gRNA
ccccctagagcagcaggaggagg

SEQ ID NO: 4696 - DNA, 23 bp, Artificial Sequence
  HLA-A targeting gRNA
ccccctccttaccccatctcagg

SEQ ID NO: 4697 - DNA, 23 bp, Artificial Sequence
  HLA-A targeting gRNA
ccccctccttactccatctcagg

SEQ ID NO: 4698 - DNA, 23 bp, Artificial Sequence
  HLA-A targeting gRNA
ccccgcccccgtggtcagcccgg

SEQ ID NO: 4699 - DNA, 23 bp, Artificial Sequence
  HLA-A targeting gRNA
ccccgccccgaccaacccgcggg

SEQ ID NO: 4700 - DNA, 23 bp, Artificial Sequence
  HLA-A targeting gRNA
ccccgccccgcccaacccgcggg

SEQ ID NO: 4701 - DNA, 23 bp, Artificial Sequence
  HLA-A targeting gRNA
ccccgccctgaccaacccgcggg

SEQ ID NO: 4702 - DNA, 23 bp, Artificial Sequence
  HLA-A targeting gRNA
ccccgcgggttgggcggggcggg

SEQ ID NO: 4703 - DNA, 23 bp, Artificial Sequence
  HLA-A targeting gRNA
ccccgcgggttggtcagggcggg

SEQ ID NO: 4704 - DNA, 23 bp, Artificial Sequence
  HLA-A targeting gRNA
ccccgcgggttggtcgggactgg

SEQ ID NO: 4705 - DNA, 23 bp, Artificial Sequence
  HLA-A targeting gRNA
ccccgcgggttggtcggggcggg

SEQ ID NO: 4706 - DNA, 23 bp, Artificial Sequence
  HLA-A targeting gRNA
ccccgcgggttggtcggggctgg

SEQ ID NO: 4707 - DNA, 23 bp, Artificial Sequence
  HLA-A targeting gRNA
ccccggccgtacgtgggggatgg

SEQ ID NO: 4708 - DNA, 23 bp, Artificial Sequence
  HLA-A targeting gRNA
ccccggcgacctataggagatgg

SEQ ID NO: 4709 - DNA, 23 bp, Artificial Sequence
  HLA-A targeting gRNA
ccccggcggtccaggagcgcagg

SEQ ID NO: 4710 - DNA, 23 bp, Artificial Sequence
  HLA-A targeting gRNA
ccccgggccggggtcactcacgg

SEQ ID NO: 4711 - DNA, 23 bp, Artificial Sequence
  HLA-A targeting gRNA
cccctagagcagcaggaggaggg

SEQ ID NO: 4712 - DNA, 23 bp, Artificial Sequence
  HLA-A targeting gRNA
cccctccctcctctccgcagagg

SEQ ID NO: 4713 - DNA, 23 bp, Artificial Sequence
  HLA-A targeting gRNA
cccctccttaccccagctcaggg

SEQ ID NO: 4714 - DNA, 23 bp, Artificial Sequence
  HLA-A targeting gRNA
cccctccttaccccatctcaggg

SEQ ID NO: 4715 - DNA, 23 bp, Artificial Sequence
  HLA-A targeting gRNA
cccctccttactccatctcaggg

SEQ ID NO: 4716 - DNA, 23 bp, Artificial Sequence
  HLA-A targeting gRNA
cccctcgctcctccccacagagg

SEQ ID NO: 4717 - DNA, 23 bp, Artificial Sequence
  HLA-A targeting gRNA
cccctcgctcctcccggcagagg

SEQ ID NO: 4718 - DNA, 23 bp, Artificial Sequence
  HLA-A targeting gRNA
cccctcgctcctctcagcagagg

SEQ ID NO: 4719 - DNA, 23 bp, Artificial Sequence
  HLA-A targeting gRNA
cccctcgctcctctccatagagg

SEQ ID NO: 4720 - DNA, 23 bp, Artificial Sequence
  HLA-A targeting gRNA
cccctcgctcctctccccagagg

SEQ ID NO: 4721 - DNA, 23 bp, Artificial Sequence
  HLA-A targeting gRNA
cccctcgctcctctccgcagagg

SEQ ID NO: 4722 - DNA, 23 bp, Artificial Sequence
  HLA-A targeting gRNA
cccctctctcctccccacagagg

SEQ ID NO: 4723 - DNA, 23 bp, Artificial Sequence
  HLA-A targeting gRNA
ccccttgctcctccctacagagg

SEQ ID NO: 4724 - DNA, 23 bp, Artificial Sequence
  HLA-A targeting gRNA
cccgaccggcgcctcctccgcgg

SEQ ID NO: 4725 - DNA, 23 bp, Artificial Sequence
  HLA-A targeting gRNA
cccgacgggcccctcctccgcgg

SEQ ID NO: 4726 - DNA, 23 bp, Artificial Sequence
  HLA-A targeting gRNA
cccgacgggcgcctcctccacgg

SEQ ID NO: 4727 - DNA, 23 bp, Artificial Sequence
  HLA-A targeting gRNA
cccgacgggcgcctcctccgcgg

SEQ ID NO: 4728 - DNA, 23 bp, Artificial Sequence
  HLA-A targeting gRNA
cccgacgggcgcttcctccgcgg

SEQ ID NO: 4729 - DNA, 23 bp, Artificial Sequence
  HLA-A targeting gRNA
cccgacgggcgtctcctccgcgg

SEQ ID NO: 4730 - DNA, 23 bp, Artificial Sequence
  HLA-A targeting gRNA
cccgcagccgggccgggacatgg

SEQ ID NO: 4731 - DNA, 23 bp, Artificial Sequence
  HLA-A targeting gRNA
cccgccccgaccaacccgcgggg

SEQ ID NO: 4732 - DNA, 23 bp, Artificial Sequence
  HLA-A targeting gRNA
cccgccccgcccaacccgcgggg

SEQ ID NO: 4733 - DNA, 23 bp, Artificial Sequence
  HLA-A targeting gRNA
cccgccctgaccaacccgcgggg

SEQ ID NO: 4734 - DNA, 23 bp, Artificial Sequence
  HLA-A targeting gRNA
cccgcggaggaagcgcccgtcgg

SEQ ID NO: 4735 - DNA, 23 bp, Artificial Sequence
  HLA-A targeting gRNA
cccgcggaggagacgcccgtcgg

SEQ ID NO: 4736 - DNA, 23 bp, Artificial Sequence
  HLA-A targeting gRNA
cccgcggaggaggcgcccgccgg

SEQ ID NO: 4737 - DNA, 23 bp, Artificial Sequence
  HLA-A targeting gRNA
cccgcggaggaggcgcccgtagg

SEQ ID NO: 4738 - DNA, 23 bp, Artificial Sequence
  HLA-A targeting gRNA
cccgcggaggaggcgcccgtcgg

SEQ ID NO: 4739 - DNA, 23 bp, Artificial Sequence
  HLA-A targeting gRNA
cccgcggaggaggcgcccgtggg

SEQ ID NO: 4740 - DNA, 23 bp, Artificial Sequence
  HLA-A targeting gRNA
cccgcggaggaggcgccggtcgg

SEQ ID NO: 4741 - DNA, 23 bp, Artificial Sequence
  HLA-A targeting gRNA
cccgcggaggaggggcccgtcgg

SEQ ID NO: 4742 - DNA, 23 bp, Artificial Sequence
  HLA-A targeting gRNA
cccgcggccaggccgggacacgg

SEQ ID NO: 4743 - DNA, 23 bp, Artificial Sequence
  HLA-A targeting gRNA
cccgcggccaggccgggacatgg

SEQ ID NO: 4744 - DNA, 23 bp, Artificial Sequence
  HLA-A targeting gRNA
cccgcggccgggccaggacacgg

SEQ ID NO: 4745 - DNA, 23 bp, Artificial Sequence
  HLA-A targeting gRNA
cccgcggccgggccgggacgtgg

SEQ ID NO: 4746 - DNA, 23 bp, Artificial Sequence
  HLA-A targeting gRNA
cccgcggccgggccgggtcatgg

SEQ ID NO: 4747 - DNA, 23 bp, Artificial Sequence
  HLA-A targeting gRNA
cccgcgggttgggcggggcgggg

SEQ ID NO: 4748 - DNA, 23 bp, Artificial Sequence
  HLA-A targeting gRNA
cccgcgggttggtcagggcgggg

SEQ ID NO: 4749 - DNA, 23 bp, Artificial Sequence
  HLA-A targeting gRNA
cccgcgggttggtcgggactggg

SEQ ID NO: 4750 - DNA, 23 bp, Artificial Sequence
  HLA-A targeting gRNA
cccgcgggttggtcggggcgggg

SEQ ID NO: 4751 - DNA, 23 bp, Artificial Sequence
  HLA-A targeting gRNA
cccgcgggttggtcggggctggg

SEQ ID NO: 4752 - DNA, 23 bp, Artificial Sequence
  HLA-A targeting gRNA
cccgctgccgggccgggacacgg

SEQ ID NO: 4753 - DNA, 23 bp, Artificial Sequence
  HLA-A targeting gRNA
cccggagactcggggcgacccgg

SEQ ID NO: 4754 - DNA, 23 bp, Artificial Sequence
  HLA-A targeting gRNA
cccggccgtacgtgggggatggg

SEQ ID NO: 4755 - DNA, 23 bp, Artificial Sequence
  HLA-A targeting gRNA
cccggcgacctataggagatggg

SEQ ID NO: 4756 - DNA, 23 bp, Artificial Sequence
  HLA-A targeting gRNA
cccggcgagggcgcaggacccgg

SEQ ID NO: 4757 - DNA, 23 bp, Artificial Sequence
  HLA-A targeting gRNA
cccggcgggcgcctcctccgcgg

SEQ ID NO: 4758 - DNA, 23 bp, Artificial Sequence
  HLA-A targeting gRNA
cccggctgaagggctccagaagg

SEQ ID NO: 4759 - DNA, 23 bp, Artificial Sequence
  HLA-A targeting gRNA
cccgggagatctacaggagatgg

SEQ ID NO: 4760 - DNA, 23 bp, Artificial Sequence
  HLA-A targeting gRNA
cccgggagatctacgggagatgg

SEQ ID NO: 4761 - DNA, 23 bp, Artificial Sequence
  HLA-A targeting gRNA
cccgggagatctataggagatgg

SEQ ID NO: 4762 - DNA, 23 bp, Artificial Sequence
  HLA-A targeting gRNA
cccgggccggggtcactcactgg

SEQ ID NO: 4763 - DNA, 23 bp, Artificial Sequence
  HLA-A targeting gRNA
cccgggccgtacgtcggggttgg

SEQ ID NO: 4764 - DNA, 23 bp, Artificial Sequence
  HLA-A targeting gRNA
cccgggccgtacgtgggggatgg

SEQ ID NO: 4765 - DNA, 23 bp, Artificial Sequence
  HLA-A targeting gRNA
cccgggccgtccgtgggggatgg

SEQ ID NO: 4766 - DNA, 23 bp, Artificial Sequence
  HLA-A targeting gRNA
cccgggcgatctataggagatgg

SEQ ID NO: 4767 - DNA, 23 bp, Artificial Sequence
  HLA-A targeting gRNA
cccgggtcctgcgccctcgccgg

SEQ ID NO: 4768 - DNA, 23 bp, Artificial Sequence
  HLA-A targeting gRNA
cccgggtcgccccgagtctcagg

SEQ ID NO: 4769 - DNA, 23 bp, Artificial Sequence
  HLA-A targeting gRNA
cccgggtcgccccgagtctccgg

SEQ ID NO: 4770 - DNA, 23 bp, Artificial Sequence
  HLA-A targeting gRNA
cccggtcccaatactccgtccgg

SEQ ID NO: 4771 - DNA, 23 bp, Artificial Sequence
  HLA-A targeting gRNA
cccggtttcattttcagttgagg

SEQ ID NO: 4772 - DNA, 23 bp, Artificial Sequence
  HLA-A targeting gRNA
cccggtttcattttcggtttagg

SEQ ID NO: 4773 - DNA, 23 bp, Artificial Sequence
  HLA-A targeting gRNA
cccggtttcgttttcagtttagg

SEQ ID NO: 4774 - DNA, 23 bp, Artificial Sequence
  HLA-A targeting gRNA
cccgtctgagatccaccccaagg

SEQ ID NO: 4775 - DNA, 23 bp, Artificial Sequence
  HLA-A targeting gRNA
cccgtctgagatccaccccgagg

SEQ ID NO: 4776 - DNA, 23 bp, Artificial Sequence
  HLA-A targeting gRNA
cccgtggaggaggcgcccgtcgg

SEQ ID NO: 4777 - DNA, 23 bp, Artificial Sequence
  HLA-A targeting gRNA
ccctacgggcgcctcctccgcgg

SEQ ID NO: 4778 - DNA, 23 bp, Artificial Sequence
  HLA-A targeting gRNA
ccctccagaggatgtacggctgg

SEQ ID NO: 4779 - DNA, 23 bp, Artificial Sequence
  HLA-A targeting gRNA
ccctccccaaccccgacgtacgg

SEQ ID NO: 4780 - DNA, 23 bp, Artificial Sequence
  HLA-A targeting gRNA
ccctccccatcccccacggacgg

SEQ ID NO: 4781 - DNA, 23 bp, Artificial Sequence
  HLA-A targeting gRNA
ccctcccgacccgcactcaccgg

SEQ ID NO: 4782 - DNA, 23 bp, Artificial Sequence
  HLA-A targeting gRNA
ccctcccttgaatggaaaatggg

SEQ ID NO: 4783 - DNA, 23 bp, Artificial Sequence
  HLA-A targeting gRNA
ccctcccttgaatggagaatggg

SEQ ID NO: 4784 - DNA, 23 bp, Artificial Sequence
  HLA-A targeting gRNA
ccctcctcatcccccacggacgg

SEQ ID NO: 4785 - DNA, 23 bp, Artificial Sequence
  HLA-A targeting gRNA
ccctcctcctgctgctctagggg

SEQ ID NO: 4786 - DNA, 23 bp, Artificial Sequence
  HLA-A targeting gRNA
ccctcctcctgctgctctggggg

SEQ ID NO: 4787 - DNA, 23 bp, Artificial Sequence
  HLA-A targeting gRNA
ccctgagactcggggcgacccgg

SEQ ID NO: 4788 - DNA, 23 bp, Artificial Sequence
  HLA-A targeting gRNA
ccctgagatggagtaaggagggg

SEQ ID NO: 4789 - DNA, 23 bp, Artificial Sequence
  HLA-A targeting gRNA
ccctgagatggggtaaggagggg

SEQ ID NO: 4790 - DNA, 23 bp, Artificial Sequence
  HLA-A targeting gRNA
ccctgagctggggtaaggagggg

SEQ ID NO: 4791 - DNA, 23 bp, Artificial Sequence
  HLA-A targeting gRNA
ccctgcagcgcgcgggtaccagg

SEQ ID NO: 4792 - DNA, 23 bp, Artificial Sequence
  HLA-A targeting gRNA
ccctgccgacccgcactcaccgg

SEQ ID NO: 4793 - DNA, 23 bp, Artificial Sequence
  HLA-A targeting gRNA
ccctgccgtcgtaggcgtactgg

SEQ ID NO: 4794 - DNA, 23 bp, Artificial Sequence
  HLA-A targeting gRNA
ccctgctaaggacagaccttagg

SEQ ID NO: 4795 - DNA, 23 bp, Artificial Sequence
  HLA-A targeting gRNA
ccctgctgaagggctccagaagg

SEQ ID NO: 4796 - DNA, 23 bp, Artificial Sequence
  HLA-A targeting gRNA
ccctggccctgaccgagacctgg

SEQ ID NO: 4797 - DNA, 23 bp, Artificial Sequence
  HLA-A targeting gRNA
ccctggccctgatcgagacctgg

SEQ ID NO: 4798 - DNA, 23 bp, Artificial Sequence
  HLA-A targeting gRNA
ccctgggcactgtcgctgcctgg

SEQ ID NO: 4799 - DNA, 23 bp, Artificial Sequence
  HLA-A targeting gRNA
ccctgggcactgtcgctggctgg

SEQ ID NO: 4800 - DNA, 23 bp, Artificial Sequence
  HLA-A targeting gRNA
ccctgggcactgttgctgcctgg

SEQ ID NO: 4801 - DNA, 23 bp, Artificial Sequence
  HLA-A targeting gRNA
ccctgggcactgttgctggctgg

SEQ ID NO: 4802 - DNA, 23 bp, Artificial Sequence
  HLA-A targeting gRNA
ccctggtacccgcgcgctgcagg

SEQ ID NO: 4803 - DNA, 23 bp, Artificial Sequence
  HLA-A targeting gRNA
cccttctggagcccttcagcagg

SEQ ID NO: 4804 - DNA, 23 bp, Artificial Sequence
  HLA-A targeting gRNA
cccttgaagtcacaaaggggagg

SEQ ID NO: 4805 - DNA, 23 bp, Artificial Sequence
  HLA-A targeting gRNA
ccgaaaatgaaaccgggtaaagg

SEQ ID NO: 4806 - DNA, 23 bp, Artificial Sequence
  HLA-A targeting gRNA
ccgaccggcgcctcctccgcggg

SEQ ID NO: 4807 - DNA, 23 bp, Artificial Sequence
  HLA-A targeting gRNA
ccgacgggcccctcctccgcggg

SEQ ID NO: 4808 - DNA, 23 bp, Artificial Sequence
  HLA-A targeting gRNA
ccgacgggcgcctcctccacggg

SEQ ID NO: 4809 - DNA, 23 bp, Artificial Sequence
  HLA-A targeting gRNA
ccgacgggcgcctcctccgcggg

SEQ ID NO: 4810 - DNA, 23 bp, Artificial Sequence
  HLA-A targeting gRNA
ccgacgggcgcttcctccgcggg

SEQ ID NO: 4811 - DNA, 23 bp, Artificial Sequence
  HLA-A targeting gRNA
ccgacgggcgtctcctccgcggg

SEQ ID NO: 4812 - DNA, 23 bp, Artificial Sequence
  HLA-A targeting gRNA
ccgagagccttgtctgcattggg

SEQ ID NO: 4813 - DNA, 23 bp, Artificial Sequence
  HLA-A targeting gRNA
ccgagggccgcgtctgcaatggg

SEQ ID NO: 4814 - DNA, 23 bp, Artificial Sequence
  HLA-A targeting gRNA
ccgagggccgcgtctgcattggg

SEQ ID NO: 4815 - DNA, 23 bp, Artificial Sequence
  HLA-A targeting gRNA
ccgagtccgggtgggtgactggg

SEQ ID NO: 4816 - DNA, 23 bp, Artificial Sequence
  HLA-A targeting gRNA
ccgcagcggtccaggagcgcagg

SEQ ID NO: 4817 - DNA, 23 bp, Artificial Sequence
  HLA-A targeting gRNA
ccgccgcgatccaggagctcagg

SEQ ID NO: 4818 - DNA, 23 bp, Artificial Sequence
  HLA-A targeting gRNA
ccgccgcggtccaggagctcagg

SEQ ID NO: 4819 - DNA, 23 bp, Artificial Sequence
  HLA-A targeting gRNA
ccgccgcggtccaggagcttagg

SEQ ID NO: 4820 - DNA, 23 bp, Artificial Sequence
  HLA-A targeting gRNA
ccgccgcggtccgggagctcagg

SEQ ID NO: 4821 - DNA, 23 bp, Artificial Sequence
  HLA-A targeting gRNA
ccgcggaggaagcgcccgtcggg

SEQ ID NO: 4822 - DNA, 23 bp, Artificial Sequence
  HLA-A targeting gRNA
ccgcggaggagacgcccgtcggg

SEQ ID NO: 4823 - DNA, 23 bp, Artificial Sequence
  HLA-A targeting gRNA
ccgcggaggaggcgcccatccgg

SEQ ID NO: 4824 - DNA, 23 bp, Artificial Sequence
  HLA-A targeting gRNA
ccgcggaggaggcgcccgccggg

SEQ ID NO: 4825 - DNA, 23 bp, Artificial Sequence
  HLA-A targeting gRNA
ccgcggaggaggcgcccgtaggg

SEQ ID NO: 4826 - DNA, 23 bp, Artificial Sequence
  HLA-A targeting gRNA
ccgcggaggaggcgcccgtcggg

SEQ ID NO: 4827 - DNA, 23 bp, Artificial Sequence
  HLA-A targeting gRNA
ccgcggaggaggcgcccgtgggg

SEQ ID NO: 4828 - DNA, 23 bp, Artificial Sequence
  HLA-A targeting gRNA
ccgcggaggaggcgccggtcggg

SEQ ID NO: 4829 - DNA, 23 bp, Artificial Sequence
  HLA-A targeting gRNA
ccgcggaggaggggcccgtcggg

SEQ ID NO: 4830 - DNA, 23 bp, Artificial Sequence
  HLA-A targeting gRNA
ccgcggcaatccaggagcgcagg

SEQ ID NO: 4831 - DNA, 23 bp, Artificial Sequence
  HLA-A targeting gRNA
ccgcggcagtccaggagcgcagg

SEQ ID NO: 4832 - DNA, 23 bp, Artificial Sequence
  HLA-A targeting gRNA
ccgcggcggtccaggagcgcagg

SEQ ID NO: 4833 - DNA, 23 bp, Artificial Sequence
  HLA-A targeting gRNA
ccgcggcggtccaggagctcagg

SEQ ID NO: 4834 - DNA, 23 bp, Artificial Sequence
  HLA-A targeting gRNA
ccgcggcggtccaggagggcagg

SEQ ID NO: 4835 - DNA, 23 bp, Artificial Sequence
  HLA-A targeting gRNA
ccgcgggttggtcgggactgggg

SEQ ID NO: 4836 - DNA, 23 bp, Artificial Sequence
  HLA-A targeting gRNA
ccgcgggttggtcggggctgggg

SEQ ID NO: 4837 - DNA, 23 bp, Artificial Sequence
  HLA-A targeting gRNA
ccgcggtgtccgccgcggtccgg

SEQ ID NO: 4838 - DNA, 23 bp, Artificial Sequence
  HLA-A targeting gRNA
ccgcggtgtccgccgcgtccagg

SEQ ID NO: 4839 - DNA, 23 bp, Artificial Sequence
  HLA-A targeting gRNA
ccggaacacacagatctacaagg

SEQ ID NO: 4840 - DNA, 23 bp, Artificial Sequence
  HLA-A targeting gRNA
ccggaacacacagatctgcaagg

SEQ ID NO: 4841 - DNA, 23 bp, Artificial Sequence
  HLA-A targeting gRNA
ccggaccgcggcggacaccgcgg

SEQ ID NO: 4842 - DNA, 23 bp, Artificial Sequence
  HLA-A targeting gRNA
ccggacggagtattgggaccggg

SEQ ID NO: 4843 - DNA, 23 bp, Artificial Sequence
  HLA-A targeting gRNA
ccggacgggcgcctcctccgtgg

SEQ ID NO: 4844 - DNA, 23 bp, Artificial Sequence
  HLA-A targeting gRNA
ccggagactcggggcgaccccgg

SEQ ID NO: 4845 - DNA, 23 bp, Artificial Sequence
  HLA-A targeting gRNA
ccggagactcggggcgacccggg

SEQ ID NO: 4846 - DNA, 23 bp, Artificial Sequence
  HLA-A targeting gRNA
ccggatgggcgcctcctccgcgg

SEQ ID NO: 4847 - DNA, 23 bp, Artificial Sequence
  HLA-A targeting gRNA
ccggccgtacgtgggggatgggg

SEQ ID NO: 4848 - DNA, 23 bp, Artificial Sequence
  HLA-A targeting gRNA
ccggcgacctataggagatgggg

SEQ ID NO: 4849 - DNA, 23 bp, Artificial Sequence
  HLA-A targeting gRNA
ccggcgagggcgcaggacccggg

SEQ ID NO: 4850 - DNA, 23 bp, Artificial Sequence
  HLA-A targeting gRNA
ccggcgggcgcctcctccgcggg

SEQ ID NO: 4851 - DNA, 23 bp, Artificial Sequence
  HLA-A targeting gRNA
ccgggagacacagatctgcaagg

SEQ ID NO: 4852 - DNA, 23 bp, Artificial Sequence
  HLA-A targeting gRNA
ccgggagacacggaacatgaagg

SEQ ID NO: 4853 - DNA, 23 bp, Artificial Sequence
  HLA-A targeting gRNA
ccgggagactcggggcgacccgg

SEQ ID NO: 4854 - DNA, 23 bp, Artificial Sequence
  HLA-A targeting gRNA
ccgggagacttggggcgacccgg

SEQ ID NO: 4855 - DNA, 23 bp, Artificial Sequence
  HLA-A targeting gRNA
ccgggagatctacaggagatagg

SEQ ID NO: 4856 - DNA, 23 bp, Artificial Sequence
  HLA-A targeting gRNA
ccgggagatctacaggagatggg

SEQ ID NO: 4857 - DNA, 23 bp, Artificial Sequence
  HLA-A targeting gRNA
ccgggagatctacgggagatggg

SEQ ID NO: 4858 - DNA, 23 bp, Artificial Sequence
  HLA-A targeting gRNA
ccgggagatctataggagatggg

SEQ ID NO: 4859 - DNA, 23 bp, Artificial Sequence
  HLA-A targeting gRNA
ccgggagccatggatagagcagg

SEQ ID NO: 4860 - DNA, 23 bp, Artificial Sequence
  HLA-A targeting gRNA
ccgggccgtacgtcggggttggg

SEQ ID NO: 4861 - DNA, 23 bp, Artificial Sequence
  HLA-A targeting gRNA
ccgggccgtacgtgggggatggg

SEQ ID NO: 4862 - DNA, 23 bp, Artificial Sequence
  HLA-A targeting gRNA
ccgggccgtccgtgggggatggg

SEQ ID NO: 4863 - DNA, 23 bp, Artificial Sequence
  HLA-A targeting gRNA
ccgggcgatctataggagatggg

SEQ ID NO: 4864 - DNA, 23 bp, Artificial Sequence
  HLA-A targeting gRNA
ccgggcgccatggatagagcagg

SEQ ID NO: 4865 - DNA, 23 bp, Artificial Sequence
  HLA-A targeting gRNA
ccgggcgccgtggatagagcagg

SEQ ID NO: 4866 - DNA, 23 bp, Artificial Sequence
  HLA-A targeting gRNA
ccgggcgccgtgggtggagcagg

SEQ ID NO: 4867 - DNA, 23 bp, Artificial Sequence
  HLA-A targeting gRNA
ccgggctgaccacgggggcgggg

SEQ ID NO: 4868 - DNA, 23 bp, Artificial Sequence
  HLA-A targeting gRNA
ccggggtcgccccgagtctccgg

SEQ ID NO: 4869 - DNA, 23 bp, Artificial Sequence
  HLA-A targeting gRNA
ccgggtcagggctgaggcttggg

SEQ ID NO: 4870 - DNA, 23 bp, Artificial Sequence
  HLA-A targeting gRNA
ccgggtcctgcgccctcgccggg

SEQ ID NO: 4871 - DNA, 23 bp, Artificial Sequence
  HLA-A targeting gRNA
ccgggtcgccccaagtctcccgg

SEQ ID NO: 4872 - DNA, 23 bp, Artificial Sequence
  HLA-A targeting gRNA
ccgggtcgccccgagtctcaggg

SEQ ID NO: 4873 - DNA, 23 bp, Artificial Sequence
  HLA-A targeting gRNA
ccgggtcgccccgagtctcccgg

SEQ ID NO: 4874 - DNA, 23 bp, Artificial Sequence
  HLA-A targeting gRNA
ccgggtcgccccgagtctccggg

SEQ ID NO: 4875 - DNA, 23 bp, Artificial Sequence
  HLA-A targeting gRNA
ccgggtctcacaccctccagagg

SEQ ID NO: 4876 - DNA, 23 bp, Artificial Sequence
  HLA-A targeting gRNA
ccgggtctcctcgagtctctagg

SEQ ID NO: 4877 - DNA, 23 bp, Artificial Sequence
  HLA-A targeting gRNA
ccggtccgcctacgacggcaagg

SEQ ID NO: 4878 - DNA, 23 bp, Artificial Sequence
  HLA-A targeting gRNA
ccggtctgagatccaccccgagg

SEQ ID NO: 4879 - DNA, 23 bp, Artificial Sequence
  HLA-A targeting gRNA
ccggtctgagatcctccccgagg

SEQ ID NO: 4880 - DNA, 23 bp, Artificial Sequence
  HLA-A targeting gRNA
ccggtgagtgaccccggcctggg

SEQ ID NO: 4881 - DNA, 23 bp, Artificial Sequence
  HLA-A targeting gRNA
ccggtgagtgcgggatcgggagg

SEQ ID NO: 4882 - DNA, 23 bp, Artificial Sequence
  HLA-A targeting gRNA
ccggtgagtgcggggtcggcagg

SEQ ID NO: 4883 - DNA, 23 bp, Artificial Sequence
  HLA-A targeting gRNA
ccggtgagtgcggggtcgggagg

SEQ ID NO: 4884 - DNA, 23 bp, Artificial Sequence
  HLA-A targeting gRNA
ccggtgagtgcggggttgggagg

SEQ ID NO: 4885 - DNA, 23 bp, Artificial Sequence
  HLA-A targeting gRNA
ccggtgagtgcgggtcggcaggg

SEQ ID NO: 4886 - DNA, 23 bp, Artificial Sequence
  HLA-A targeting gRNA
ccggtgagtgcgggtcgggaggg

SEQ ID NO: 4887 - DNA, 23 bp, Artificial Sequence
  HLA-A targeting gRNA
ccgtacgtcggggttggggaggg

SEQ ID NO: 4888 - DNA, 23 bp, Artificial Sequence
  HLA-A targeting gRNA
ccgtccgtgggggatgaggaggg

SEQ ID NO: 4889 - DNA, 23 bp, Artificial Sequence
  HLA-A targeting gRNA
ccgtccgtgggggatggggaggg

SEQ ID NO: 4890 - DNA, 23 bp, Artificial Sequence
  HLA-A targeting gRNA
ccgtcctcctgctgctctggggg

SEQ ID NO: 4891 - DNA, 23 bp, Artificial Sequence
  HLA-A targeting gRNA
ccgtcctcggactcgcggcgtgg

SEQ ID NO: 4892 - DNA, 23 bp, Artificial Sequence
  HLA-A targeting gRNA
ccgtgagtgaccccggcccgggg

SEQ ID NO: 4893 - DNA, 23 bp, Artificial Sequence
  HLA-A targeting gRNA
ccgtggaggaggcgcccgtcggg

SEQ ID NO: 4894 - DNA, 23 bp, Artificial Sequence
  HLA-A targeting gRNA
ccgtggtggttgtggtgttgggg

SEQ ID NO: 4895 - DNA, 23 bp, Artificial Sequence
  HLA-A targeting gRNA
ccgtgtcccggcccggcagcggg

SEQ ID NO: 4896 - DNA, 23 bp, Artificial Sequence
  HLA-A targeting gRNA
ccgtgtcccggcctggccgcggg

SEQ ID NO: 4897 - DNA, 23 bp, Artificial Sequence
  HLA-A targeting gRNA
ccgtgtcctggcccggccgcggg

SEQ ID NO: 4898 - DNA, 23 bp, Artificial Sequence
  HLA-A targeting gRNA
ccgttctcaggatggtcacatgg

SEQ ID NO: 4899 - DNA, 23 bp, Artificial Sequence
  HLA-A targeting gRNA
cctaaaccgaaaatgaaaccggg

SEQ ID NO: 4900 - DNA, 23 bp, Artificial Sequence
  HLA-A targeting gRNA
cctaaactgaaaacgaaaccggg

SEQ ID NO: 4901 - DNA, 23 bp, Artificial Sequence
  HLA-A targeting gRNA
cctaagctcctggaccgcggcgg

SEQ ID NO: 4902 - DNA, 23 bp, Artificial Sequence
  HLA-A targeting gRNA
cctaaggtctgtccttagcaggg

SEQ ID NO: 4903 - DNA, 23 bp, Artificial Sequence
  HLA-A targeting gRNA
cctacgggcgcctcctccgcggg

SEQ ID NO: 4904 - DNA, 23 bp, Artificial Sequence
  HLA-A targeting gRNA
cctagagactcgaggagacccgg

SEQ ID NO: 4905 - DNA, 23 bp, Artificial Sequence
  HLA-A targeting gRNA
cctagctgtcctaggagctatgg

SEQ ID NO: 4906 - DNA, 23 bp, Artificial Sequence
  HLA-A targeting gRNA
cctagctgtcctaggagctgtgg

SEQ ID NO: 4907 - DNA, 23 bp, Artificial Sequence
  HLA-A targeting gRNA
cctagctgtccttggagctgtgg

SEQ ID NO: 4908 - DNA, 23 bp, Artificial Sequence
  HLA-A targeting gRNA
cctatctcctgtagatctcccgg

SEQ ID NO: 4909 - DNA, 23 bp, Artificial Sequence
  HLA-A targeting gRNA
cctatgaggggactgggaggagg

SEQ ID NO: 4910 - DNA, 23 bp, Artificial Sequence
  HLA-A targeting gRNA
cctcaactgaaaatgaaaccggg

SEQ ID NO: 4911 - DNA, 23 bp, Artificial Sequence
  HLA-A targeting gRNA
cctcaaggagtgggagcctgggg

SEQ ID NO: 4912 - DNA, 23 bp, Artificial Sequence
  HLA-A targeting gRNA
cctcacaagacagctgtctcagg

SEQ ID NO: 4913 - DNA, 23 bp, Artificial Sequence
  HLA-A targeting gRNA
cctcacactcagtgtgtttgggg

SEQ ID NO: 4914 - DNA, 23 bp, Artificial Sequence
  HLA-A targeting gRNA
cctcaccctgagatggagtaagg

SEQ ID NO: 4915 - DNA, 23 bp, Artificial Sequence
  HLA-A targeting gRNA
cctcaccctgagctggggtaagg

SEQ ID NO: 4916 - DNA, 23 bp, Artificial Sequence
  HLA-A targeting gRNA
cctcatgaagtgggagcctgggg

SEQ ID NO: 4917 - DNA, 23 bp, Artificial Sequence
  HLA-A targeting gRNA
cctcatggagagggagcctgggg

SEQ ID NO: 4918 - DNA, 23 bp, Artificial Sequence
  HLA-A targeting gRNA
cctcatggagtggaagcctgggg

SEQ ID NO: 4919 - DNA, 23 bp, Artificial Sequence
  HLA-A targeting gRNA
cctcatggagtgggaacctgggg

SEQ ID NO: 4920 - DNA, 23 bp, Artificial Sequence
  HLA-A targeting gRNA
cctcatggagtgggagactgggg

SEQ ID NO: 4921 - DNA, 23 bp, Artificial Sequence
  HLA-A targeting gRNA
cctcatggtcagagacgagatgg

SEQ ID NO: 4922 - DNA, 23 bp, Artificial Sequence
  HLA-A targeting gRNA
cctcatggtcagagacgggatgg

SEQ ID NO: 4923 - DNA, 23 bp, Artificial Sequence
  HLA-A targeting gRNA
cctcatggtcagagacggggtgg

SEQ ID NO: 4924 - DNA, 23 bp, Artificial Sequence
  HLA-A targeting gRNA
cctcatggtcagagagggggtgg

SEQ ID NO: 4925 - DNA, 23 bp, Artificial Sequence
  HLA-A targeting gRNA
cctcatggtcagagatgggatgg

SEQ ID NO: 4926 - DNA, 23 bp, Artificial Sequence
  HLA-A targeting gRNA
cctccagaggatgtacggctggg

SEQ ID NO: 4927 - DNA, 23 bp, Artificial Sequence
  HLA-A targeting gRNA
cctcccaaccccgcactcacagg

SEQ ID NO: 4928 - DNA, 23 bp, Artificial Sequence
  HLA-A targeting gRNA
cctcccaaccccgcactcaccgg

SEQ ID NO: 4929 - DNA, 23 bp, Artificial Sequence
  HLA-A targeting gRNA
cctcccaacctcgcactcacagg

SEQ ID NO: 4930 - DNA, 23 bp, Artificial Sequence
  HLA-A targeting gRNA
cctcccctttgtgacttcaaggg

SEQ ID NO: 4931 - DNA, 23 bp, Artificial Sequence
  HLA-A targeting gRNA
cctcccgaccccgcactcaccgg

SEQ ID NO: 4932 - DNA, 23 bp, Artificial Sequence
  HLA-A targeting gRNA
cctcccgatcccgcactcaccgg

SEQ ID NO: 4933 - DNA, 23 bp, Artificial Sequence
  HLA-A targeting gRNA
cctcctaaccccgcactcacagg

SEQ ID NO: 4934 - DNA, 23 bp, Artificial Sequence
  HLA-A targeting gRNA
cctcctcacattaggctaacagg

SEQ ID NO: 4935 - DNA, 23 bp, Artificial Sequence
  HLA-A targeting gRNA
cctcctcacattatgctaacagg

SEQ ID NO: 4936 - DNA, 23 bp, Artificial Sequence
  HLA-A targeting gRNA
cctcctcccagtcccctcatagg

SEQ ID NO: 4937 - DNA, 23 bp, Artificial Sequence
  HLA-A targeting gRNA
cctcctccctgtcccctcacagg

SEQ ID NO: 4938 - DNA, 23 bp, Artificial Sequence
  HLA-A targeting gRNA
cctcctccgcgggcataaccagg

SEQ ID NO: 4939 - DNA, 23 bp, Artificial Sequence
  HLA-A targeting gRNA
cctcctccgcgggtaccaccagg

SEQ ID NO: 4940 - DNA, 23 bp, Artificial Sequence
  HLA-A targeting gRNA
cctcctccgcgggtatgaccagg

SEQ ID NO: 4941 - DNA, 23 bp, Artificial Sequence
  HLA-A targeting gRNA
cctcctcctgctgctctaggggg

SEQ ID NO: 4942 - DNA, 23 bp, Artificial Sequence
  HLA-A targeting gRNA
cctcctcctgctgctctgggggg

SEQ ID NO: 4943 - DNA, 23 bp, Artificial Sequence
  HLA-A targeting gRNA
cctcgaccgcagagagccccagg

SEQ ID NO: 4944 - DNA, 23 bp, Artificial Sequence
  HLA-A targeting gRNA
cctcgaccggcgagagccccagg

SEQ ID NO: 4945 - DNA, 23 bp, Artificial Sequence
  HLA-A targeting gRNA
cctcgatggttgtggtgttgggg

SEQ ID NO: 4946 - DNA, 23 bp, Artificial Sequence
  HLA-A targeting gRNA
cctcggggaggatctcagaccgg

SEQ ID NO: 4947 - DNA, 23 bp, Artificial Sequence
  HLA-A targeting gRNA
cctcggggtggatctcagaccgg

SEQ ID NO: 4948 - DNA, 23 bp, Artificial Sequence
  HLA-A targeting gRNA
cctcggggtggatctcagacggg

SEQ ID NO: 4949 - DNA, 23 bp, Artificial Sequence
  HLA-A targeting gRNA
cctctatggagaggagcgagggg

SEQ ID NO: 4950 - DNA, 23 bp, Artificial Sequence
  HLA-A targeting gRNA
cctctcggtcagtctgtgcctgg

SEQ ID NO: 4951 - DNA, 23 bp, Artificial Sequence
  HLA-A targeting gRNA
cctctgccgggaggagcgagggg

SEQ ID NO: 4952 - DNA, 23 bp, Artificial Sequence
  HLA-A targeting gRNA
cctctgcggagaggagcgagggg

SEQ ID NO: 4953 - DNA, 23 bp, Artificial Sequence
  HLA-A targeting gRNA
cctctgcggagaggagggagggg

SEQ ID NO: 4954 - DNA, 23 bp, Artificial Sequence
  HLA-A targeting gRNA
cctctgctgagaggagcgagggg

SEQ ID NO: 4955 - DNA, 23 bp, Artificial Sequence
  HLA-A targeting gRNA
cctctggagggtgtgagacccgg

SEQ ID NO: 4956 - DNA, 23 bp, Artificial Sequence
  HLA-A targeting gRNA
cctctggggagaggagcgagggg

SEQ ID NO: 4957 - DNA, 23 bp, Artificial Sequence
  HLA-A targeting gRNA
cctctgtagggaggagcaagggg

SEQ ID NO: 4958 - DNA, 23 bp, Artificial Sequence
  HLA-A targeting gRNA
cctctgtggggaggagagagggg

SEQ ID NO: 4959 - DNA, 23 bp, Artificial Sequence
  HLA-A targeting gRNA
cctctgtggggaggagcgagggg

SEQ ID NO: 4960 - DNA, 23 bp, Artificial Sequence
  HLA-A targeting gRNA
cctgaccacagctgccgcagtgg

SEQ ID NO: 4961 - DNA, 23 bp, Artificial Sequence
  HLA-A targeting gRNA
cctgaccacagctgctgcagtgg

SEQ ID NO: 4962 - DNA, 23 bp, Artificial Sequence
  HLA-A targeting gRNA
cctgagacagctgcctgtgtggg

SEQ ID NO: 4963 - DNA, 23 bp, Artificial Sequence
  HLA-A targeting gRNA
cctgagacagctgtcttgtgagg

SEQ ID NO: 4964 - DNA, 23 bp, Artificial Sequence
  HLA-A targeting gRNA
cctgagactcggggcgacccggg

SEQ ID NO: 4965 - DNA, 23 bp, Artificial Sequence
  HLA-A targeting gRNA
cctgagatggagtaaggaggggg

SEQ ID NO: 4966 - DNA, 23 bp, Artificial Sequence
  HLA-A targeting gRNA
cctgagatggggtaaggaggggg

SEQ ID NO: 4967 - DNA, 23 bp, Artificial Sequence
  HLA-A targeting gRNA
cctgagctcccggaccgcggcgg

SEQ ID NO: 4968 - DNA, 23 bp, Artificial Sequence
  HLA-A targeting gRNA
cctgagctcctggaccgccgcgg

SEQ ID NO: 4969 - DNA, 23 bp, Artificial Sequence
  HLA-A targeting gRNA
cctgagctcctggaccgcggcgg

SEQ ID NO: 4970 - DNA, 23 bp, Artificial Sequence
  HLA-A targeting gRNA
cctgagctcctggatcgcggcgg

SEQ ID NO: 4971 - DNA, 23 bp, Artificial Sequence
  HLA-A targeting gRNA
cctgcagcgcgcgggtaccaggg

SEQ ID NO: 4972 - DNA, 23 bp, Artificial Sequence
  HLA-A targeting gRNA
cctgcatctcagtcccacacagg

SEQ ID NO: 4973 - DNA, 23 bp, Artificial Sequence
  HLA-A targeting gRNA
cctgccctcctggaccgccgcgg

SEQ ID NO: 4974 - DNA, 23 bp, Artificial Sequence
  HLA-A targeting gRNA
cctgccgaccccgcactcaccgg

SEQ ID NO: 4975 - DNA, 23 bp, Artificial Sequence
  HLA-A targeting gRNA
cctgcgctcctggaccgccgcgg

SEQ ID NO: 4976 - DNA, 23 bp, Artificial Sequence
  HLA-A targeting gRNA
cctgcgctcctggaccgccgggg

SEQ ID NO: 4977 - DNA, 23 bp, Artificial Sequence
  HLA-A targeting gRNA
cctgcgctcctggaccgctgcgg

SEQ ID NO: 4978 - DNA, 23 bp, Artificial Sequence
  HLA-A targeting gRNA
cctgcgctcctggactgccgcgg

SEQ ID NO: 4979 - DNA, 23 bp, Artificial Sequence
  HLA-A targeting gRNA
cctgcgctcctggattgccgcgg

SEQ ID NO: 4980 - DNA, 23 bp, Artificial Sequence
  HLA-A targeting gRNA
cctgcgtccaggctggtgtctgg

SEQ ID NO: 4981 - DNA, 23 bp, Artificial Sequence
  HLA-A targeting gRNA
cctgcgtccaggctggtgtttgg

SEQ ID NO: 4982 - DNA, 23 bp, Artificial Sequence
  HLA-A targeting gRNA
cctgcgtccgggctggtgtctgg

SEQ ID NO: 4983 - DNA, 23 bp, Artificial Sequence
  HLA-A targeting gRNA
cctgctccacccacggcgcccgg

SEQ ID NO: 4984 - DNA, 23 bp, Artificial Sequence
  HLA-A targeting gRNA
cctgctctatccacggcgcccgg

SEQ ID NO: 4985 - DNA, 23 bp, Artificial Sequence
  HLA-A targeting gRNA
cctgctctatccatggcgcccgg

SEQ ID NO: 4986 - DNA, 23 bp, Artificial Sequence
  HLA-A targeting gRNA
cctgctctatccatggctcccgg

SEQ ID NO: 4987 - DNA, 23 bp, Artificial Sequence
  HLA-A targeting gRNA
cctgctgaagggctccagaaggg

SEQ ID NO: 4988 - DNA, 23 bp, Artificial Sequence
  HLA-A targeting gRNA
cctgctgctctagggggcagtgg

SEQ ID NO: 4989 - DNA, 23 bp, Artificial Sequence
  HLA-A targeting gRNA
cctgctgctctcggcggccctgg

SEQ ID NO: 4990 - DNA, 23 bp, Artificial Sequence
  HLA-A targeting gRNA
cctgctgctctcgggagccctgg

SEQ ID NO: 4991 - DNA, 23 bp, Artificial Sequence
  HLA-A targeting gRNA
cctgctgctctcgggaggcctgg

SEQ ID NO: 4992 - DNA, 23 bp, Artificial Sequence
  HLA-A targeting gRNA
cctgctgctctcgggagtcctgg

SEQ ID NO: 4993 - DNA, 23 bp, Artificial Sequence
  HLA-A targeting gRNA
cctgctgctctggggggcagtgg

SEQ ID NO: 4994 - DNA, 23 bp, Artificial Sequence
  HLA-A targeting gRNA
cctgctgctctggggggccctgg

SEQ ID NO: 4995 - DNA, 23 bp, Artificial Sequence
  HLA-A targeting gRNA
cctggacgcggcggacaccgcgg

SEQ ID NO: 4996 - DNA, 23 bp, Artificial Sequence
  HLA-A targeting gRNA
cctggccctgaccgagacctggg

SEQ ID NO: 4997 - DNA, 23 bp, Artificial Sequence
  HLA-A targeting gRNA
cctggccctgatcgagacctggg

SEQ ID NO: 4998 - DNA, 23 bp, Artificial Sequence
  HLA-A targeting gRNA
cctggctgtcctagcagttgtgg

SEQ ID NO: 4999 - DNA, 23 bp, Artificial Sequence
  HLA-A targeting gRNA
cctggctgtcctggctgtcctgg

SEQ ID NO: 5000 - DNA, 23 bp, Artificial Sequence
  HLA-A targeting gRNA
cctgggcactgttgctgcctggg

SEQ ID NO: 5001 - DNA, 23 bp, Artificial Sequence
  HLA-A targeting gRNA
cctgggcactgttgctggctggg

SEQ ID NO: 5002 - DNA, 23 bp, Artificial Sequence
  HLA-A targeting gRNA
cctggggctctcgccggtcgagg

SEQ ID NO: 5003 - DNA, 23 bp, Artificial Sequence
  HLA-A targeting gRNA
cctggggctctctgcggtcgagg

SEQ ID NO: 5004 - DNA, 23 bp, Artificial Sequence
  HLA-A targeting gRNA
cctggggcttgaaaccccagtgg

SEQ ID NO: 5005 - DNA, 23 bp, Artificial Sequence
  HLA-A targeting gRNA
cctggtacccgcgcgctgcaggg

SEQ ID NO: 5006 - DNA, 23 bp, Artificial Sequence
  HLA-A targeting gRNA
cctggtcatacccgcggaggagg

SEQ ID NO: 5007 - DNA, 23 bp, Artificial Sequence
  HLA-A targeting gRNA
cctggtggtacccgcggaggagg

SEQ ID NO: 5008 - DNA, 23 bp, Artificial Sequence
  HLA-A targeting gRNA
cctggttatgcccgcggaggagg

SEQ ID NO: 5009 - DNA, 23 bp, Artificial Sequence
  HLA-A targeting gRNA
cctgtgaggggacagggaggagg

SEQ ID NO: 5010 - DNA, 23 bp, Artificial Sequence
  HLA-A targeting gRNA
cctgtgagtgcgaggttgggagg

SEQ ID NO: 5011 - DNA, 23 bp, Artificial Sequence
  HLA-A targeting gRNA
cctgtgagtgcggggttaggagg

SEQ ID NO: 5012 - DNA, 23 bp, Artificial Sequence
  HLA-A targeting gRNA
cctgtgagtgcggggttgggagg

SEQ ID NO: 5013 - DNA, 23 bp, Artificial Sequence
  HLA-A targeting gRNA
cctgtgtccaggctggcgtctgg

SEQ ID NO: 5014 - DNA, 23 bp, Artificial Sequence
  HLA-A targeting gRNA
cctgtgtgggactgagatgcagg

SEQ ID NO: 5015 - DNA, 23 bp, Artificial Sequence
  HLA-A targeting gRNA
cctgttagcataatgtgaggagg

SEQ ID NO: 5016 - DNA, 23 bp, Artificial Sequence
  HLA-A targeting gRNA
cctgttagcctaatgtgaggagg

SEQ ID NO: 5017 - DNA, 23 bp, Artificial Sequence
  HLA-A targeting gRNA
ccttaatggttgtggtgttgggg

SEQ ID NO: 5018 - DNA, 23 bp, Artificial Sequence
  HLA-A targeting gRNA
ccttaccccagctcagggtgagg

SEQ ID NO: 5019 - DNA, 23 bp, Artificial Sequence
  HLA-A targeting gRNA
ccttactccatctcagggtgagg

SEQ ID NO: 5020 - DNA, 23 bp, Artificial Sequence
  HLA-A targeting gRNA
ccttcatgttccgtgtctcccgg

SEQ ID NO: 5021 - DNA, 23 bp, Artificial Sequence
  HLA-A targeting gRNA
ccttctggagcccttcagcaggg

SEQ ID NO: 5022 - DNA, 23 bp, Artificial Sequence
  HLA-A targeting gRNA
ccttctggagcccttcagccggg

SEQ ID NO: 5023 - DNA, 23 bp, Artificial Sequence
  HLA-A targeting gRNA
ccttgatgattatggtgttgggg

SEQ ID NO: 5024 - DNA, 23 bp, Artificial Sequence
  HLA-A targeting gRNA
ccttgatggttgtggtgttgggg

SEQ ID NO: 5025 - DNA, 23 bp, Artificial Sequence
  HLA-A targeting gRNA
ccttgcagatctgtgtctcccgg

SEQ ID NO: 5026 - DNA, 23 bp, Artificial Sequence
  HLA-A targeting gRNA
ccttgcagatctgtgtgttccgg

SEQ ID NO: 5027 - DNA, 23 bp, Artificial Sequence
  HLA-A targeting gRNA
ccttgccatcgtaggcgaactgg

SEQ ID NO: 5028 - DNA, 23 bp, Artificial Sequence
  HLA-A targeting gRNA
ccttgccgtcctaggcggactgg

SEQ ID NO: 5029 - DNA, 23 bp, Artificial Sequence
  HLA-A targeting gRNA
ccttgccgtcgcaggcggactgg

SEQ ID NO: 5030 - DNA, 23 bp, Artificial Sequence
  HLA-A targeting gRNA
ccttgccgtcgtaggagtactgg

SEQ ID NO: 5031 - DNA, 23 bp, Artificial Sequence
  HLA-A targeting gRNA
ccttgccgtcgtaggcaaactgg

SEQ ID NO: 5032 - DNA, 23 bp, Artificial Sequence
  HLA-A targeting gRNA
ccttgccgtcgtaggcggaccgg

SEQ ID NO: 5033 - DNA, 23 bp, Artificial Sequence
  HLA-A targeting gRNA
ccttgccgtcgtaggcggactgg

SEQ ID NO: 5034 - DNA, 23 bp, Artificial Sequence
  HLA-A targeting gRNA
ccttgccgtcgtaggcgtcctgg

SEQ ID NO: 5035 - DNA, 23 bp, Artificial Sequence
  HLA-A targeting gRNA
ccttgccgtcgtaggctaactgg

SEQ ID NO: 5036 - DNA, 23 bp, Artificial Sequence
  HLA-A targeting gRNA
ccttgccgtcttaggcggactgg

SEQ ID NO: 5037 - DNA, 23 bp, Artificial Sequence
  HLA-A targeting gRNA
ccttggggtggatctcagacggg

SEQ ID NO: 5038 - DNA, 23 bp, Artificial Sequence
  HLA-A targeting gRNA
ccttggtggttgtggcgttgggg

SEQ ID NO: 5039 - DNA, 23 bp, Artificial Sequence
  HLA-A targeting gRNA
ccttggtggttgtggtgttgggg

SEQ ID NO: 5040 - DNA, 23 bp, Artificial Sequence
  HLA-A targeting gRNA
ccttgtagatctgtgtgttccgg

SEQ ID NO: 5041 - DNA, 23 bp, Artificial Sequence
  HLA-A targeting gRNA
ccttgtggtcaccgtagctgtgg

SEQ ID NO: 5042 - DNA, 23 bp, Artificial Sequence
  HLA-A targeting gRNA
cctttacccggtttcattttcgg

SEQ ID NO: 5043 - DNA, 23 bp, Artificial Sequence
  HLA-A targeting gRNA
cgaaaccgggtaaaggtgactgg

SEQ ID NO: 5044 - DNA, 23 bp, Artificial Sequence
  HLA-A targeting gRNA
cgaactggtcatacccgcggagg

SEQ ID NO: 5045 - DNA, 23 bp, Artificial Sequence
  HLA-A targeting gRNA
cgaactggtcatgcccgcggagg

SEQ ID NO: 5046 - DNA, 23 bp, Artificial Sequence
  HLA-A targeting gRNA
cgaactggttatacccgcggagg

SEQ ID NO: 5047 - DNA, 23 bp, Artificial Sequence
  HLA-A targeting gRNA
cgaactggttatacccgtggagg

SEQ ID NO: 5048 - DNA, 23 bp, Artificial Sequence
  HLA-A targeting gRNA
cgaactggttatgcccgcggagg

SEQ ID NO: 5049 - DNA, 23 bp, Artificial Sequence
  HLA-A targeting gRNA
cgaagcccctcaccctgagatgg

SEQ ID NO: 5050 - DNA, 23 bp, Artificial Sequence
  HLA-A targeting gRNA
cgaagtcccaggccccgggcggg

SEQ ID NO: 5051 - DNA, 23 bp, Artificial Sequence
  HLA-A targeting gRNA
cgaagtcccaggtcccggacggg

SEQ ID NO: 5052 - DNA, 23 bp, Artificial Sequence
  HLA-A targeting gRNA
cgaagtcccaggtcccgggcggg

SEQ ID NO: 5053 - DNA, 23 bp, Artificial Sequence
  HLA-A targeting gRNA
cgaagtcccatgtcccggacggg

SEQ ID NO: 5054 - DNA, 23 bp, Artificial Sequence
  HLA-A targeting gRNA
cgaccaacccgcggggattttgg

SEQ ID NO: 5055 - DNA, 23 bp, Artificial Sequence
  HLA-A targeting gRNA
cgaccccgcgagtccgagagggg

SEQ ID NO: 5056 - DNA, 23 bp, Artificial Sequence
  HLA-A targeting gRNA
cgacccctccccatcccccacgg

SEQ ID NO: 5057 - DNA, 23 bp, Artificial Sequence
  HLA-A targeting gRNA
cgacccctcctcatcccccacgg

SEQ ID NO: 5058 - DNA, 23 bp, Artificial Sequence
  HLA-A targeting gRNA
cgacccgcactcacccgcccagg

SEQ ID NO: 5059 - DNA, 23 bp, Artificial Sequence
  HLA-A targeting gRNA
cgacccgcactcaccggcccagg

SEQ ID NO: 5060 - DNA, 23 bp, Artificial Sequence
  HLA-A targeting gRNA
cgacctataggagatggggaagg

SEQ ID NO: 5061 - DNA, 23 bp, Artificial Sequence
  HLA-A targeting gRNA
cgacctctccccatcccccacgg

SEQ ID NO: 5062 - DNA, 23 bp, Artificial Sequence
  HLA-A targeting gRNA
cgacgccacgagtccgaggaagg

SEQ ID NO: 5063 - DNA, 23 bp, Artificial Sequence
  HLA-A targeting gRNA
cgacgccacgagtccgaggatgg

SEQ ID NO: 5064 - DNA, 23 bp, Artificial Sequence
  HLA-A targeting gRNA
cgacgccgcaagtccgagagggg

SEQ ID NO: 5065 - DNA, 23 bp, Artificial Sequence
  HLA-A targeting gRNA
cgacgccgcgagtccaagagggg

SEQ ID NO: 5066 - DNA, 23 bp, Artificial Sequence
  HLA-A targeting gRNA
cgacgccgcgagtccgagaaggg

SEQ ID NO: 5067 - DNA, 23 bp, Artificial Sequence
  HLA-A targeting gRNA
cgacgccgcgagtccgagagagg

SEQ ID NO: 5068 - DNA, 23 bp, Artificial Sequence
  HLA-A targeting gRNA
cgacgccgcgagtccgagagggg

SEQ ID NO: 5069 - DNA, 23 bp, Artificial Sequence
  HLA-A targeting gRNA
cgacgccgcgagtccgaggaagg

SEQ ID NO: 5070 - DNA, 23 bp, Artificial Sequence
  HLA-A targeting gRNA
cgacgccgcgagtccgaggacgg

SEQ ID NO: 5071 - DNA, 23 bp, Artificial Sequence
  HLA-A targeting gRNA
cgacgccgcgagtccgaggatgg

SEQ ID NO: 5072 - DNA, 23 bp, Artificial Sequence
  HLA-A targeting gRNA
cgacgccgcgagtccgagggggg

SEQ ID NO: 5073 - DNA, 23 bp, Artificial Sequence
  HLA-A targeting gRNA
cgacgctgcgagtccgaggacgg

SEQ ID NO: 5074 - DNA, 23 bp, Artificial Sequence
  HLA-A targeting gRNA
cgactccgcgagtccaagagggg

SEQ ID NO: 5075 - DNA, 23 bp, Artificial Sequence
  HLA-A targeting gRNA
cgagagaggagccgcgggcgcgg

SEQ ID NO: 5076 - DNA, 23 bp, Artificial Sequence
  HLA-A targeting gRNA
cgagagccttgtctgcattgggg

SEQ ID NO: 5077 - DNA, 23 bp, Artificial Sequence
  HLA-A targeting gRNA
cgagatccgccccgaggccgcgg

SEQ ID NO: 5078 - DNA, 23 bp, Artificial Sequence
  HLA-A targeting gRNA
cgagcagctgagagcctacctgg

SEQ ID NO: 5079 - DNA, 23 bp, Artificial Sequence
  HLA-A targeting gRNA
cgagggccgcgtctgcaatgggg

SEQ ID NO: 5080 - DNA, 23 bp, Artificial Sequence
  HLA-A targeting gRNA
cgagggccgcgtctgcattgggg

SEQ ID NO: 5081 - DNA, 23 bp, Artificial Sequence
  HLA-A targeting gRNA
cgagtccaagaggggagccgcgg

SEQ ID NO: 5082 - DNA, 23 bp, Artificial Sequence
  HLA-A targeting gRNA
cgagtccgagagaggagccgcgg

SEQ ID NO: 5083 - DNA, 23 bp, Artificial Sequence
  HLA-A targeting gRNA
cgagtccgagaggggagccccgg

SEQ ID NO: 5084 - DNA, 23 bp, Artificial Sequence
  HLA-A targeting gRNA
cgagtccgagaggggagccgcgg

SEQ ID NO: 5085 - DNA, 23 bp, Artificial Sequence
  HLA-A targeting gRNA
cgagtccgaggaaggagccgcgg

SEQ ID NO: 5086 - DNA, 23 bp, Artificial Sequence
  HLA-A targeting gRNA
cgagtccgaggacggagccccgg

SEQ ID NO: 5087 - DNA, 23 bp, Artificial Sequence
  HLA-A targeting gRNA
cgagtccgaggacggagccctgg

SEQ ID NO: 5088 - DNA, 23 bp, Artificial Sequence
  HLA-A targeting gRNA
cgagtccgaggatggagccccgg

SEQ ID NO: 5089 - DNA, 23 bp, Artificial Sequence
  HLA-A targeting gRNA
cgagtccgaggatggcgccccgg

SEQ ID NO: 5090 - DNA, 23 bp, Artificial Sequence
  HLA-A targeting gRNA
cgagtccgaggatggcgccctgg

SEQ ID NO: 5091 - DNA, 23 bp, Artificial Sequence
  HLA-A targeting gRNA
cgagtccgaggggggagccgcgg

SEQ ID NO: 5092 - DNA, 23 bp, Artificial Sequence
  HLA-A targeting gRNA
cgagtccgggtgggtgactgggg

SEQ ID NO: 5093 - DNA, 23 bp, Artificial Sequence
  HLA-A targeting gRNA
cgagtctctgagcggggaacagg

SEQ ID NO: 5094 - DNA, 23 bp, Artificial Sequence
  HLA-A targeting gRNA
cgagtctctgagtggggaacagg

SEQ ID NO: 5095 - DNA, 23 bp, Artificial Sequence
  HLA-A targeting gRNA
cgatctataggagatggggaagg

SEQ ID NO: 5096 - DNA, 23 bp, Artificial Sequence
  HLA-A targeting gRNA
cgatgaagcggagctccccgcgg

SEQ ID NO: 5097 - DNA, 23 bp, Artificial Sequence
  HLA-A targeting gRNA
cgatgaagcggggctccccacgg

SEQ ID NO: 5098 - DNA, 23 bp, Artificial Sequence
  HLA-A targeting gRNA
cgatgaagcggggctctccgcgg

SEQ ID NO: 5099 - DNA, 23 bp, Artificial Sequence
  HLA-A targeting gRNA
cgatgaagtggggctccccgcgg

SEQ ID NO: 5100 - DNA, 23 bp, Artificial Sequence
  HLA-A targeting gRNA
cgatgaagtggggctctccgcgg

SEQ ID NO: 5101 - DNA, 23 bp, Artificial Sequence
  HLA-A targeting gRNA
cgatgtacggctgcgacgtgggg

SEQ ID NO: 5102 - DNA, 23 bp, Artificial Sequence
  HLA-A targeting gRNA
cgatgtatggctgcgacatgggg

SEQ ID NO: 5103 - DNA, 23 bp, Artificial Sequence
  HLA-A targeting gRNA
cgatgtatggctgcgacctgggg

SEQ ID NO: 5104 - DNA, 23 bp, Artificial Sequence
  HLA-A targeting gRNA
cgatgtatggctgcgacgtgggg

SEQ ID NO: 5105 - DNA, 23 bp, Artificial Sequence
  HLA-A targeting gRNA
cgcaagttggaggcggcccgtgg

SEQ ID NO: 5106 - DNA, 23 bp, Artificial Sequence
  HLA-A targeting gRNA
cgcacgggccgcctccaacttgg

SEQ ID NO: 5107 - DNA, 23 bp, Artificial Sequence
  HLA-A targeting gRNA
cgcagccaaacatccactggagg

SEQ ID NO: 5108 - DNA, 23 bp, Artificial Sequence
  HLA-A targeting gRNA
cgcagccaaacatcctctggagg

SEQ ID NO: 5109 - DNA, 23 bp, Artificial Sequence
  HLA-A targeting gRNA
cgcagccacacatccactggagg

SEQ ID NO: 5110 - DNA, 23 bp, Artificial Sequence
  HLA-A targeting gRNA
cgcagccagacatcctctggagg

SEQ ID NO: 5111 - DNA, 23 bp, Artificial Sequence
  HLA-A targeting gRNA
cgcagccatacatattctggagg

SEQ ID NO: 5112 - DNA, 23 bp, Artificial Sequence
  HLA-A targeting gRNA
cgcagccatacatccactggagg

SEQ ID NO: 5113 - DNA, 23 bp, Artificial Sequence
  HLA-A targeting gRNA
cgcagccatacatccgctggagg

SEQ ID NO: 5114 - DNA, 23 bp, Artificial Sequence
  HLA-A targeting gRNA
cgcagccatacatgctctggagg

SEQ ID NO: 5115 - DNA, 23 bp, Artificial Sequence
  HLA-A targeting gRNA
cgcagccgtacaagctctggagg

SEQ ID NO: 5116 - DNA, 23 bp, Artificial Sequence
  HLA-A targeting gRNA
cgcagccgtacatccactggagg

SEQ ID NO: 5117 - DNA, 23 bp, Artificial Sequence
  HLA-A targeting gRNA
cgcagccgtacatcctctggagg

SEQ ID NO: 5118 - DNA, 23 bp, Artificial Sequence
  HLA-A targeting gRNA
cgcagccgtacatcctctggcgg

SEQ ID NO: 5119 - DNA, 23 bp, Artificial Sequence
  HLA-A targeting gRNA
cgcagccgtacatcgtctggagg

SEQ ID NO: 5120 - DNA, 23 bp, Artificial Sequence
  HLA-A targeting gRNA
cgcagccgtacatgctctggagg

SEQ ID NO: 5121 - DNA, 23 bp, Artificial Sequence
  HLA-A targeting gRNA
cgcaggagacgtgggacaggagg

SEQ ID NO: 5122 - DNA, 23 bp, Artificial Sequence
  HLA-A targeting gRNA
cgcaggagacgttggacaggagg

SEQ ID NO: 5123 - DNA, 23 bp, Artificial Sequence
  HLA-A targeting gRNA
cgcaggagatgtgggacaagagg

SEQ ID NO: 5124 - DNA, 23 bp, Artificial Sequence
  HLA-A targeting gRNA
cgcagggaggagggtcgggcggg

SEQ ID NO: 5125 - DNA, 23 bp, Artificial Sequence
  HLA-A targeting gRNA
cgcagggaggtgggtcgggcggg

SEQ ID NO: 5126 - DNA, 23 bp, Artificial Sequence
  HLA-A targeting gRNA
cgcaggtaccaggggcagtgggg

SEQ ID NO: 5127 - DNA, 23 bp, Artificial Sequence
  HLA-A targeting gRNA
cgccatggatagagcaagagggg

SEQ ID NO: 5128 - DNA, 23 bp, Artificial Sequence
  HLA-A targeting gRNA
cgccatggatagagcaggagggg

SEQ ID NO: 5129 - DNA, 23 bp, Artificial Sequence
  HLA-A targeting gRNA
cgcccaacccgcggggattttgg

SEQ ID NO: 5130 - DNA, 23 bp, Artificial Sequence
  HLA-A targeting gRNA
cgccctggatagagcaggagggg

SEQ ID NO: 5131 - DNA, 23 bp, Artificial Sequence
  HLA-A targeting gRNA
cgccgagagcagcaggaggacgg

SEQ ID NO: 5132 - DNA, 23 bp, Artificial Sequence
  HLA-A targeting gRNA
cgccgggaggagggtctggcggg

SEQ ID NO: 5133 - DNA, 23 bp, Artificial Sequence
  HLA-A targeting gRNA
cgccgggaggtgggtcgggcggg

SEQ ID NO: 5134 - DNA, 23 bp, Artificial Sequence
  HLA-A targeting gRNA
cgccggtaggagggtcgggcggg

SEQ ID NO: 5135 - DNA, 23 bp, Artificial Sequence
  HLA-A targeting gRNA
cgccggtcgagggtctgggcggg

SEQ ID NO: 5136 - DNA, 23 bp, Artificial Sequence
  HLA-A targeting gRNA
cgccggtcgagggtttgggcggg

SEQ ID NO: 5137 - DNA, 23 bp, Artificial Sequence
  HLA-A targeting gRNA
cgccgtggatagagcaagagggg

SEQ ID NO: 5138 - DNA, 23 bp, Artificial Sequence
  HLA-A targeting gRNA
cgccgtgggtggagaaggagggg

SEQ ID NO: 5139 - DNA, 23 bp, Artificial Sequence
  HLA-A targeting gRNA
cgccgtgggtggagcaggagggg

SEQ ID NO: 5140 - DNA, 23 bp, Artificial Sequence
  HLA-A targeting gRNA
cgccgtgtccgcagcggtccagg

SEQ ID NO: 5141 - DNA, 23 bp, Artificial Sequence
  HLA-A targeting gRNA
cgccgtgtccgccgcggtccagg

SEQ ID NO: 5142 - DNA, 23 bp, Artificial Sequence
  HLA-A targeting gRNA
cgccgtgtccgcggcaatccagg

SEQ ID NO: 5143 - DNA, 23 bp, Artificial Sequence
  HLA-A targeting gRNA
cgccgtgtccgcggcagtccagg

SEQ ID NO: 5144 - DNA, 23 bp, Artificial Sequence
  HLA-A targeting gRNA
cgccgtgtccgcggcggtccagg

SEQ ID NO: 5145 - DNA, 23 bp, Artificial Sequence
  HLA-A targeting gRNA
cgccttgatggttgtggtgttgg

SEQ ID NO: 5146 - DNA, 23 bp, Artificial Sequence
  HLA-A targeting gRNA
cgccttgtccgcggcggtccagg

SEQ ID NO: 5147 - DNA, 23 bp, Artificial Sequence
  HLA-A targeting gRNA
cgcgcaggtaccaggggcagtgg

SEQ ID NO: 5148 - DNA, 23 bp, Artificial Sequence
  HLA-A targeting gRNA
cgcgcccgcggctcctctctcgg

SEQ ID NO: 5149 - DNA, 23 bp, Artificial Sequence
  HLA-A targeting gRNA
cgcgcgggtaccaagggcagtgg

SEQ ID NO: 5150 - DNA, 23 bp, Artificial Sequence
  HLA-A targeting gRNA
cgcgcgggtaccaggggcagtgg

SEQ ID NO: 5151 - DNA, 23 bp, Artificial Sequence
  HLA-A targeting gRNA
cgcgcgggtaccggggcagtggg

SEQ ID NO: 5152 - DNA, 23 bp, Artificial Sequence
  HLA-A targeting gRNA
cgcgctgcagcgtctccttccgg

SEQ ID NO: 5153 - DNA, 23 bp, Artificial Sequence
  HLA-A targeting gRNA
cgcgctggtaccaggggcagtgg

SEQ ID NO: 5154 - DNA, 23 bp, Artificial Sequence
  HLA-A targeting gRNA
cgcggcctcggggcggatctcgg

SEQ ID NO: 5155 - DNA, 23 bp, Artificial Sequence
  HLA-A targeting gRNA
cgcgggacggggctgaccacggg

SEQ ID NO: 5156 - DNA, 23 bp, Artificial Sequence
  HLA-A targeting gRNA
cgcgggtaccaagggcagtgggg

SEQ ID NO: 5157 - DNA, 23 bp, Artificial Sequence
  HLA-A targeting gRNA
cgcgggtaccaggggcagtgggg

SEQ ID NO: 5158 - DNA, 23 bp, Artificial Sequence
  HLA-A targeting gRNA
cgcggtatccgcggcggtccagg

SEQ ID NO: 5159 - DNA, 23 bp, Artificial Sequence
  HLA-A targeting gRNA
cgcggtcagccccgtccccccgg

SEQ ID NO: 5160 - DNA, 23 bp, Artificial Sequence
  HLA-A targeting gRNA
cgcggtggatagagcaggagggg

SEQ ID NO: 5161 - DNA, 23 bp, Artificial Sequence
  HLA-A targeting gRNA
cgcggtgtccgcagcggtccagg

SEQ ID NO: 5162 - DNA, 23 bp, Artificial Sequence
  HLA-A targeting gRNA
cgcggtgtccgccgcgatccagg

SEQ ID NO: 5163 - DNA, 23 bp, Artificial Sequence
  HLA-A targeting gRNA
cgcggtgtccgccgcggtccagg

SEQ ID NO: 5164 - DNA, 23 bp, Artificial Sequence
  HLA-A targeting gRNA
cgcggtgtccgccgcggtccggg

SEQ ID NO: 5165 - DNA, 23 bp, Artificial Sequence
  HLA-A targeting gRNA
cgcggtgtccgcggcggtccagg

SEQ ID NO: 5166 - DNA, 23 bp, Artificial Sequence
  HLA-A targeting gRNA
cgctctggttgtagccgcgcagg

SEQ ID NO: 5167 - DNA, 23 bp, Artificial Sequence
  HLA-A targeting gRNA
cgctgcaacgcgcgggtaccagg

SEQ ID NO: 5168 - DNA, 23 bp, Artificial Sequence
  HLA-A targeting gRNA
cgctgcagagcgcgggtaccagg

SEQ ID NO: 5169 - DNA, 23 bp, Artificial Sequence
  HLA-A targeting gRNA
cgctgcagcacgcgggtaccagg

SEQ ID NO: 5170 - DNA, 23 bp, Artificial Sequence
  HLA-A targeting gRNA
cgctgcagcgcgcaggtaccagg

SEQ ID NO: 5171 - DNA, 23 bp, Artificial Sequence
  HLA-A targeting gRNA
cgctgcagcgcgcgggtaccggg

SEQ ID NO: 5172 - DNA, 23 bp, Artificial Sequence
  HLA-A targeting gRNA
cgctggagcgcgcgggtaccagg

SEQ ID NO: 5173 - DNA, 23 bp, Artificial Sequence
  HLA-A targeting gRNA
cgctggagggtgtgagaccctgg

SEQ ID NO: 5174 - DNA, 23 bp, Artificial Sequence
  HLA-A targeting gRNA
cgctggtaccaggggcagtgggg

SEQ ID NO: 5175 - DNA, 23 bp, Artificial Sequence
  HLA-A targeting gRNA
cgctgtcgaacctcacgaactgg

SEQ ID NO: 5176 - DNA, 23 bp, Artificial Sequence
  HLA-A targeting gRNA
cgctgtgtccccggcggtccagg

SEQ ID NO: 5177 - DNA, 23 bp, Artificial Sequence
  HLA-A targeting gRNA
cgctgtgtccgcggcggtccagg

SEQ ID NO: 5178 - DNA, 23 bp, Artificial Sequence
  HLA-A targeting gRNA
cgcttgtaaaggtgagattctgg

SEQ ID NO: 5179 - DNA, 23 bp, Artificial Sequence
  HLA-A targeting gRNA
cgcttgtaaggtgagattctggg

SEQ ID NO: 5180 - DNA, 23 bp, Artificial Sequence
  HLA-A targeting gRNA
cggacaggacacctggggtgggg

SEQ ID NO: 5181 - DNA, 23 bp, Artificial Sequence
  HLA-A targeting gRNA
cggaccggtcatacccgcggagg

SEQ ID NO: 5182 - DNA, 23 bp, Artificial Sequence
  HLA-A targeting gRNA
cggacgggcgcctcctccgtggg

SEQ ID NO: 5183 - DNA, 23 bp, Artificial Sequence
  HLA-A targeting gRNA
cggactcacattctccccagagg

SEQ ID NO: 5184 - DNA, 23 bp, Artificial Sequence
  HLA-A targeting gRNA
cggactgatcatacccgcggagg

SEQ ID NO: 5185 - DNA, 23 bp, Artificial Sequence
  HLA-A targeting gRNA
cggactggccatacccgcggagg

SEQ ID NO: 5186 - DNA, 23 bp, Artificial Sequence
  HLA-A targeting gRNA
cggactggtcatacccgcggagg

SEQ ID NO: 5187 - DNA, 23 bp, Artificial Sequence
  HLA-A targeting gRNA
cggactggtcatgcccgcggagg

SEQ ID NO: 5188 - DNA, 23 bp, Artificial Sequence
  HLA-A targeting gRNA
cggagcagctgagagcctaccgg

SEQ ID NO: 5189 - DNA, 23 bp, Artificial Sequence
  HLA-A targeting gRNA
cggagcccctcaccctgagatgg

SEQ ID NO: 5190 - DNA, 23 bp, Artificial Sequence
  HLA-A targeting gRNA
cggagctgtggtcgctgctgtgg

SEQ ID NO: 5191 - DNA, 23 bp, Artificial Sequence
  HLA-A targeting gRNA
cggatacctggagaacgggaagg

SEQ ID NO: 5192 - DNA, 23 bp, Artificial Sequence
  HLA-A targeting gRNA
cggatgggcgcctcctccgcggg

SEQ ID NO: 5193 - DNA, 23 bp, Artificial Sequence
  HLA-A targeting gRNA
cggatgtatggctgcgacctggg

SEQ ID NO: 5194 - DNA, 23 bp, Artificial Sequence
  HLA-A targeting gRNA
cggattccgcagcctcggggtgg

SEQ ID NO: 5195 - DNA, 23 bp, Artificial Sequence
  HLA-A targeting gRNA
cggcaaggattacatcgccctgg

SEQ ID NO: 5196 - DNA, 23 bp, Artificial Sequence
  HLA-A targeting gRNA
cggcagggaaatggcctctgtgg

SEQ ID NO: 5197 - DNA, 23 bp, Artificial Sequence
  HLA-A targeting gRNA
cggcatggcctcccacgaggagg

SEQ ID NO: 5198 - DNA, 23 bp, Artificial Sequence
  HLA-A targeting gRNA
cggccactacaaccagagcgagg

SEQ ID NO: 5199 - DNA, 23 bp, Artificial Sequence
  HLA-A targeting gRNA
cggcccctcctgctctatccagg

SEQ ID NO: 5200 - DNA, 23 bp, Artificial Sequence
  HLA-A targeting gRNA
cggcccgtgaggcggagcaacgg

SEQ ID NO: 5201 - DNA, 23 bp, Artificial Sequence
  HLA-A targeting gRNA
cggcccgtgaggcggagcagcgg

SEQ ID NO: 5202 - DNA, 23 bp, Artificial Sequence
  HLA-A targeting gRNA
cggcccgtgaggcggagcagtgg

SEQ ID NO: 5203 - DNA, 23 bp, Artificial Sequence
  HLA-A targeting gRNA
cggcccgtgcggcggagcagtgg

SEQ ID NO: 5204 - DNA, 23 bp, Artificial Sequence
  HLA-A targeting gRNA
cggcccgtgtggcggagcagcgg

SEQ ID NO: 5205 - DNA, 23 bp, Artificial Sequence
  HLA-A targeting gRNA
cggccgcctcccacttgcgctgg

SEQ ID NO: 5206 - DNA, 23 bp, Artificial Sequence
  HLA-A targeting gRNA
cggccggtgaggcggagcagcgg

SEQ ID NO: 5207 - DNA, 23 bp, Artificial Sequence
  HLA-A targeting gRNA
cggcctcagggggcggatctcgg

SEQ ID NO: 5208 - DNA, 23 bp, Artificial Sequence
  HLA-A targeting gRNA
cggcctcgctctggttgtagtgg

SEQ ID NO: 5209 - DNA, 23 bp, Artificial Sequence
  HLA-A targeting gRNA
cggcctgtgaggcggagcagcgg

SEQ ID NO: 5210 - DNA, 23 bp, Artificial Sequence
  HLA-A targeting gRNA
cggcgagggcgcaggacccgggg

SEQ ID NO: 5211 - DNA, 23 bp, Artificial Sequence
  HLA-A targeting gRNA
cggctactacaaccggagcgagg

SEQ ID NO: 5212 - DNA, 23 bp, Artificial Sequence
  HLA-A targeting gRNA
cggctactataaccagagcgagg

SEQ ID NO: 5213 - DNA, 23 bp, Artificial Sequence
  HLA-A targeting gRNA
cggctcccccctcggactcgcgg

SEQ ID NO: 5214 - DNA, 23 bp, Artificial Sequence
  HLA-A targeting gRNA
cggctcccctctcggactcgcgg

SEQ ID NO: 5215 - DNA, 23 bp, Artificial Sequence
  HLA-A targeting gRNA
cggctcccctcttggactcgcgg

SEQ ID NO: 5216 - DNA, 23 bp, Artificial Sequence
  HLA-A targeting gRNA
cggctcctctctcggactcgcgg

SEQ ID NO: 5217 - DNA, 23 bp, Artificial Sequence
  HLA-A targeting gRNA
cggctccttcctcggactcgcgg

SEQ ID NO: 5218 - DNA, 23 bp, Artificial Sequence
  HLA-A targeting gRNA
cggctccttcctcggactcgtgg

SEQ ID NO: 5219 - DNA, 23 bp, Artificial Sequence
  HLA-A targeting gRNA
cggctcgtgaggcggagcagcgg

SEQ ID NO: 5220 - DNA, 23 bp, Artificial Sequence
  HLA-A targeting gRNA
cggctgcgacctgggcccgacgg

SEQ ID NO: 5221 - DNA, 23 bp, Artificial Sequence
  HLA-A targeting gRNA
cgggaaaggaagggaagatgagg

SEQ ID NO: 5222 - DNA, 23 bp, Artificial Sequence
  HLA-A targeting gRNA
cgggaagccgcgcagggaggagg

SEQ ID NO: 5223 - DNA, 23 bp, Artificial Sequence
  HLA-A targeting gRNA
cgggacacctggggtggggaagg

SEQ ID NO: 5224 - DNA, 23 bp, Artificial Sequence
  HLA-A targeting gRNA
cgggacctgcgccccgggccggg

SEQ ID NO: 5225 - DNA, 23 bp, Artificial Sequence
  HLA-A targeting gRNA
cgggacggggctgaccacggggg

SEQ ID NO: 5226 - DNA, 23 bp, Artificial Sequence
  HLA-A targeting gRNA
cgggactggggcggggctcgggg

SEQ ID NO: 5227 - DNA, 23 bp, Artificial Sequence
  HLA-A targeting gRNA
cgggagactcggggcgacccggg

SEQ ID NO: 5228 - DNA, 23 bp, Artificial Sequence
  HLA-A targeting gRNA
cgggagacttggggcgacccggg

SEQ ID NO: 5229 - DNA, 23 bp, Artificial Sequence
  HLA-A targeting gRNA
cgggagatctacaggagataggg

SEQ ID NO: 5230 - DNA, 23 bp, Artificial Sequence
  HLA-A targeting gRNA
cgggagatctacaggagatgggg

SEQ ID NO: 5231 - DNA, 23 bp, Artificial Sequence
  HLA-A targeting gRNA
cgggagatctacgggagatgggg

SEQ ID NO: 5232 - DNA, 23 bp, Artificial Sequence
  HLA-A targeting gRNA
cgggagatctataggagatgggg

SEQ ID NO: 5233 - DNA, 23 bp, Artificial Sequence
  HLA-A targeting gRNA
cgggagggaaatggcctctgtgg

SEQ ID NO: 5234 - DNA, 23 bp, Artificial Sequence
  HLA-A targeting gRNA
cgggatggcctcccacgaggagg

SEQ ID NO: 5235 - DNA, 23 bp, Artificial Sequence
  HLA-A targeting gRNA
cgggatggccttccacgaggagg

SEQ ID NO: 5236 - DNA, 23 bp, Artificial Sequence
  HLA-A targeting gRNA
cgggcatgaccagtccgcctagg

SEQ ID NO: 5237 - DNA, 23 bp, Artificial Sequence
  HLA-A targeting gRNA
cgggccgggacacggaggtgtgg

SEQ ID NO: 5238 - DNA, 23 bp, Artificial Sequence
  HLA-A targeting gRNA
cgggccgggacatggcggtgtgg

SEQ ID NO: 5239 - DNA, 23 bp, Artificial Sequence
  HLA-A targeting gRNA
cgggccgtacgtcggggttgggg

SEQ ID NO: 5240 - DNA, 23 bp, Artificial Sequence
  HLA-A targeting gRNA
cgggccgtacgtgggggatgggg

SEQ ID NO: 5241 - DNA, 23 bp, Artificial Sequence
  HLA-A targeting gRNA
cgggccgtccgtgggggatgagg

SEQ ID NO: 5242 - DNA, 23 bp, Artificial Sequence
  HLA-A targeting gRNA
cgggccgtccgtgggggatgggg

SEQ ID NO: 5243 - DNA, 23 bp, Artificial Sequence
  HLA-A targeting gRNA
cgggcgatctataggagatgggg

SEQ ID NO: 5244 - DNA, 23 bp, Artificial Sequence
  HLA-A targeting gRNA
cgggcgccgtgggtggaggaggg

SEQ ID NO: 5245 - DNA, 23 bp, Artificial Sequence
  HLA-A targeting gRNA
cggggagacacggaacatgaagg

SEQ ID NO: 5246 - DNA, 23 bp, Artificial Sequence
  HLA-A targeting gRNA
cggggagactcggggcgacccgg

SEQ ID NO: 5247 - DNA, 23 bp, Artificial Sequence
  HLA-A targeting gRNA
cggggagactctaggcgacccgg

SEQ ID NO: 5248 - DNA, 23 bp, Artificial Sequence
  HLA-A targeting gRNA
cggggagactctgggcgacccgg

SEQ ID NO: 5249 - DNA, 23 bp, Artificial Sequence
  HLA-A targeting gRNA
cggggagccgcgcagggaggagg

SEQ ID NO: 5250 - DNA, 23 bp, Artificial Sequence
  HLA-A targeting gRNA
cggggagccgcgcagggaggtgg

SEQ ID NO: 5251 - DNA, 23 bp, Artificial Sequence
  HLA-A targeting gRNA
cggggagccgcgccgggaggagg

SEQ ID NO: 5252 - DNA, 23 bp, Artificial Sequence
  HLA-A targeting gRNA
cggggagccgcgccgggaggtgg

SEQ ID NO: 5253 - DNA, 23 bp, Artificial Sequence
  HLA-A targeting gRNA
cggggagccgcgccggtaggagg

SEQ ID NO: 5254 - DNA, 23 bp, Artificial Sequence
  HLA-A targeting gRNA
cggggagcggcgcagggaggagg

SEQ ID NO: 5255 - DNA, 23 bp, Artificial Sequence
  HLA-A targeting gRNA
cggggagcggcgcagggaggtgg

SEQ ID NO: 5256 - DNA, 23 bp, Artificial Sequence
  HLA-A targeting gRNA
cggggccagggtctcacacttgg

SEQ ID NO: 5257 - DNA, 23 bp, Artificial Sequence
  HLA-A targeting gRNA
cggggccctcagaggaaactcgg

SEQ ID NO: 5258 - DNA, 23 bp, Artificial Sequence
  HLA-A targeting gRNA
cggggcggggccggggggacggg

SEQ ID NO: 5259 - DNA, 23 bp, Artificial Sequence
  HLA-A targeting gRNA
cggggcggggcggggccgggggg

SEQ ID NO: 5260 - DNA, 23 bp, Artificial Sequence
  HLA-A targeting gRNA
cggggcggggctcgggggacggg

SEQ ID NO: 5261 - DNA, 23 bp, Artificial Sequence
  HLA-A targeting gRNA
cggggcggggctcggggggacgg

SEQ ID NO: 5262 - DNA, 23 bp, Artificial Sequence
  HLA-A targeting gRNA
cggggctcgggggacggggctgg

SEQ ID NO: 5263 - DNA, 23 bp, Artificial Sequence
  HLA-A targeting gRNA
cggggctgaccacgggggcgggg

SEQ ID NO: 5264 - DNA, 23 bp, Artificial Sequence
  HLA-A targeting gRNA
cggggctgaccgcggggccgggg

SEQ ID NO: 5265 - DNA, 23 bp, Artificial Sequence
  HLA-A targeting gRNA
cggggctgaccgcggggcctagg

SEQ ID NO: 5266 - DNA, 23 bp, Artificial Sequence
  HLA-A targeting gRNA
cggggctgaccgcggggcctggg

SEQ ID NO: 5267 - DNA, 23 bp, Artificial Sequence
  HLA-A targeting gRNA
cggggctgaccgcgggggcgggg

SEQ ID NO: 5268 - DNA, 23 bp, Artificial Sequence
  HLA-A targeting gRNA
cggggctggccgcggggccgggg

SEQ ID NO: 5269 - DNA, 23 bp, Artificial Sequence
  HLA-A targeting gRNA
cggggctggggcggggctcgcgg

SEQ ID NO: 5270 - DNA, 23 bp, Artificial Sequence
  HLA-A targeting gRNA
cggggctggggcggggctcgggg

SEQ ID NO: 5271 - DNA, 23 bp, Artificial Sequence
  HLA-A targeting gRNA
cggggctggggcggggttcgggg

SEQ ID NO: 5272 - DNA, 23 bp, Artificial Sequence
  HLA-A targeting gRNA
cgggggaccgggctgaccacggg

SEQ ID NO: 5273 - DNA, 23 bp, Artificial Sequence
  HLA-A targeting gRNA
cgggggacgggctgaccacgggg

SEQ ID NO: 5274 - DNA, 23 bp, Artificial Sequence
  HLA-A targeting gRNA
cgggggacggggctgaccacggg

SEQ ID NO: 5275 - DNA, 23 bp, Artificial Sequence
  HLA-A targeting gRNA
cgggggacggggctgaccgcggg

SEQ ID NO: 5276 - DNA, 23 bp, Artificial Sequence
  HLA-A targeting gRNA
cgggggacggggctggccgcggg

SEQ ID NO: 5277 - DNA, 23 bp, Artificial Sequence
  HLA-A targeting gRNA
cgggggacggtgctgaccgcggg

SEQ ID NO: 5278 - DNA, 23 bp, Artificial Sequence
  HLA-A targeting gRNA
cgggggactgggctgaccacggg

SEQ ID NO: 5279 - DNA, 23 bp, Artificial Sequence
  HLA-A targeting gRNA
cggggggacggggctgaccgcgg

SEQ ID NO: 5280 - DNA, 23 bp, Artificial Sequence
  HLA-A targeting gRNA
cggggggactgggctgaccgcgg

SEQ ID NO: 5281 - DNA, 23 bp, Artificial Sequence
  HLA-A targeting gRNA
cgggggggggtggggtggggagg

SEQ ID NO: 5282 - DNA, 23 bp, Artificial Sequence
  HLA-A targeting gRNA
cggggggggtggggtggggaggg

SEQ ID NO: 5283 - DNA, 23 bp, Artificial Sequence
  HLA-A targeting gRNA
cggggggggtggtggggcagagg

SEQ ID NO: 5284 - DNA, 23 bp, Artificial Sequence
  HLA-A targeting gRNA
cggggtcacagtggacacaaggg

SEQ ID NO: 5285 - DNA, 23 bp, Artificial Sequence
  HLA-A targeting gRNA
cggggtcgccccgagtctccggg

SEQ ID NO: 5286 - DNA, 23 bp, Artificial Sequence
  HLA-A targeting gRNA
cggggtggggcagaggggaaagg

SEQ ID NO: 5287 - DNA, 23 bp, Artificial Sequence
  HLA-A targeting gRNA
cgggtcagggctgaggcttgggg

SEQ ID NO: 5288 - DNA, 23 bp, Artificial Sequence
  HLA-A targeting gRNA
cgggtcccgcggcctcagggagg

SEQ ID NO: 5289 - DNA, 23 bp, Artificial Sequence
  HLA-A targeting gRNA
cgggtcccgcggcctcagggggg

SEQ ID NO: 5290 - DNA, 23 bp, Artificial Sequence
  HLA-A targeting gRNA
cgggtcccgcggcctcggggcgg

SEQ ID NO: 5291 - DNA, 23 bp, Artificial Sequence
  HLA-A targeting gRNA
cgggtctgagatccaccccgagg

SEQ ID NO: 5292 - DNA, 23 bp, Artificial Sequence
  HLA-A targeting gRNA
cgggtgagtgcgggtcggcaggg

SEQ ID NO: 5293 - DNA, 23 bp, Artificial Sequence
  HLA-A targeting gRNA
cgggtgggtgacttcagaaccgg

SEQ ID NO: 5294 - DNA, 23 bp, Artificial Sequence
  HLA-A targeting gRNA
cgggttccgcagatccaccttgg

SEQ ID NO: 5295 - DNA, 23 bp, Artificial Sequence
  HLA-A targeting gRNA
cgggttccgcagcctcggggagg

SEQ ID NO: 5296 - DNA, 23 bp, Artificial Sequence
  HLA-A targeting gRNA
cgggttccgcagcctcggggtgg

SEQ ID NO: 5297 - DNA, 23 bp, Artificial Sequence
  HLA-A targeting gRNA
cgggttgggcggggcggggcggg

SEQ ID NO: 5298 - DNA, 23 bp, Artificial Sequence
  HLA-A targeting gRNA
cgggttggtcagggcggggcggg

SEQ ID NO: 5299 - DNA, 23 bp, Artificial Sequence
  HLA-A targeting gRNA
cgggttggtcgggactggggcgg

SEQ ID NO: 5300 - DNA, 23 bp, Artificial Sequence
  HLA-A targeting gRNA
cgggttggtcggggctggggcgg

SEQ ID NO: 5301 - DNA, 23 bp, Artificial Sequence
  HLA-A targeting gRNA
cggtgaccacaaggacagccagg

SEQ ID NO: 5302 - DNA, 23 bp, Artificial Sequence
  HLA-A targeting gRNA
cggtgagtgaccccggcctgggg

SEQ ID NO: 5303 - DNA, 23 bp, Artificial Sequence
  HLA-A targeting gRNA
cggtgagtgcgggatcgggaggg

SEQ ID NO: 5304 - DNA, 23 bp, Artificial Sequence
  HLA-A targeting gRNA
cggtgagtgcggggtcggcaggg

SEQ ID NO: 5305 - DNA, 23 bp, Artificial Sequence
  HLA-A targeting gRNA
cggtgagtgcggggtcgggaggg

SEQ ID NO: 5306 - DNA, 23 bp, Artificial Sequence
  HLA-A targeting gRNA
cggtgagtgcggggttgggaggg

SEQ ID NO: 5307 - DNA, 23 bp, Artificial Sequence
  HLA-A targeting gRNA
cggtgcccaaggctgctgcaggg

SEQ ID NO: 5308 - DNA, 23 bp, Artificial Sequence
  HLA-A targeting gRNA
cggtgctgaccgcggggccgggg

SEQ ID NO: 5309 - DNA, 23 bp, Artificial Sequence
  HLA-A targeting gRNA
cggttcccaaggctgctgcaggg

SEQ ID NO: 5310 - DNA, 23 bp, Artificial Sequence
  HLA-A targeting gRNA
cggttctgaagtcacccacccgg

SEQ ID NO: 5311 - DNA, 23 bp, Artificial Sequence
  HLA-A targeting gRNA
cgtaacccactgagatgaagcgg

SEQ ID NO: 5312 - DNA, 23 bp, Artificial Sequence
  HLA-A targeting gRNA
cgtacgtcggggttggggagggg

SEQ ID NO: 5313 - DNA, 23 bp, Artificial Sequence
  HLA-A targeting gRNA
cgtactggacatacccgcggagg

SEQ ID NO: 5314 - DNA, 23 bp, Artificial Sequence
  HLA-A targeting gRNA
cgtactggtcatacccgcggagg

SEQ ID NO: 5315 - DNA, 23 bp, Artificial Sequence
  HLA-A targeting gRNA
cgtactggtcatgcccgcggagg

SEQ ID NO: 5316 - DNA, 23 bp, Artificial Sequence
  HLA-A targeting gRNA
cgtactggttatacccgcggagg

SEQ ID NO: 5317 - DNA, 23 bp, Artificial Sequence
  HLA-A targeting gRNA
cgtactggttatgcccgcggagg

SEQ ID NO: 5318 - DNA, 23 bp, Artificial Sequence
  HLA-A targeting gRNA
cgtagcccacggtaatgaagcgg

SEQ ID NO: 5319 - DNA, 23 bp, Artificial Sequence
  HLA-A targeting gRNA
cgtagcccacggtgatgaagcgg

SEQ ID NO: 5320 - DNA, 23 bp, Artificial Sequence
  HLA-A targeting gRNA
cgtagcccactgagacgaagcgg

SEQ ID NO: 5321 - DNA, 23 bp, Artificial Sequence
  HLA-A targeting gRNA
cgtagcccactgagatgaagcgg

SEQ ID NO: 5322 - DNA, 23 bp, Artificial Sequence
  HLA-A targeting gRNA
cgtagcccactgcaatgaagcgg

SEQ ID NO: 5323 - DNA, 23 bp, Artificial Sequence
  HLA-A targeting gRNA
cgtagcccactgcgatgaagtgg

SEQ ID NO: 5324 - DNA, 23 bp, Artificial Sequence
  HLA-A targeting gRNA
cgtagcgcactgagatgaagcgg

SEQ ID NO: 5325 - DNA, 23 bp, Artificial Sequence
  HLA-A targeting gRNA
cgtcatggagtgggagcctgggg

SEQ ID NO: 5326 - DNA, 23 bp, Artificial Sequence
  HLA-A targeting gRNA
cgtccgtgggggatgaggagggg

SEQ ID NO: 5327 - DNA, 23 bp, Artificial Sequence
  HLA-A targeting gRNA
cgtccgtgggggatggggagagg

SEQ ID NO: 5328 - DNA, 23 bp, Artificial Sequence
  HLA-A targeting gRNA
cgtccgtgggggatggggagggg

SEQ ID NO: 5329 - DNA, 23 bp, Artificial Sequence
  HLA-A targeting gRNA
cgtcctcctgctgctctcggcgg

SEQ ID NO: 5330 - DNA, 23 bp, Artificial Sequence
  HLA-A targeting gRNA
cgtcctcctgctgctctgggggg

SEQ ID NO: 5331 - DNA, 23 bp, Artificial Sequence
  HLA-A targeting gRNA
cgtcctggtcatacccgcggagg

SEQ ID NO: 5332 - DNA, 23 bp, Artificial Sequence
  HLA-A targeting gRNA
cgtcctggtggtacccgcggagg

SEQ ID NO: 5333 - DNA, 23 bp, Artificial Sequence
  HLA-A targeting gRNA
cgtcctggttatgcccgcggagg

SEQ ID NO: 5334 - DNA, 23 bp, Artificial Sequence
  HLA-A targeting gRNA
cgtcgcagccagacatcctctgg

SEQ ID NO: 5335 - DNA, 23 bp, Artificial Sequence
  HLA-A targeting gRNA
cgtcgcagccatacatattctgg

SEQ ID NO: 5336 - DNA, 23 bp, Artificial Sequence
  HLA-A targeting gRNA
cgtcgcagccatacatcacctgg

SEQ ID NO: 5337 - DNA, 23 bp, Artificial Sequence
  HLA-A targeting gRNA
cgtcgcagccatacatccactgg

SEQ ID NO: 5338 - DNA, 23 bp, Artificial Sequence
  HLA-A targeting gRNA
cgtcgcagccatacatgctctgg

SEQ ID NO: 5339 - DNA, 23 bp, Artificial Sequence
  HLA-A targeting gRNA
cgtcgcagccgtacaagctctgg

SEQ ID NO: 5340 - DNA, 23 bp, Artificial Sequence
  HLA-A targeting gRNA
cgtcgcagccgtacatcctctgg

SEQ ID NO: 5341 - DNA, 23 bp, Artificial Sequence
  HLA-A targeting gRNA
cgtcgcagccgtacatcgtctgg

SEQ ID NO: 5342 - DNA, 23 bp, Artificial Sequence
  HLA-A targeting gRNA
cgtcgcagccgtacatgctctgg

SEQ ID NO: 5343 - DNA, 23 bp, Artificial Sequence
  HLA-A targeting gRNA
cgtcgcagccttacatcctctgg

SEQ ID NO: 5344 - DNA, 23 bp, Artificial Sequence
  HLA-A targeting gRNA
cgtgaagaaatcctgcatctcgg

SEQ ID NO: 5345 - DNA, 23 bp, Artificial Sequence
  HLA-A targeting gRNA
cgtgacctgcgccccaggccggg

SEQ ID NO: 5346 - DNA, 23 bp, Artificial Sequence
  HLA-A targeting gRNA
cgtgccatatgcagcacgagggg

SEQ ID NO: 5347 - DNA, 23 bp, Artificial Sequence
  HLA-A targeting gRNA
cgtgccatgtgcagcacgagggg

SEQ ID NO: 5348 - DNA, 23 bp, Artificial Sequence
  HLA-A targeting gRNA
cgtgccatgtgcagcatgagggg

SEQ ID NO: 5349 - DNA, 23 bp, Artificial Sequence
  HLA-A targeting gRNA
cgtgccatgttcagcacgagggg

SEQ ID NO: 5350 - DNA, 23 bp, Artificial Sequence
  HLA-A targeting gRNA
cgtgggacaggaggaattagggg

SEQ ID NO: 5351 - DNA, 23 bp, Artificial Sequence
  HLA-A targeting gRNA
cgtgggacaggaggaattatggg

SEQ ID NO: 5352 - DNA, 23 bp, Artificial Sequence
  HLA-A targeting gRNA
cgtgggcatcgttgctggcctgg

SEQ ID NO: 5353 - DNA, 23 bp, Artificial Sequence
  HLA-A targeting gRNA
cgtgggcattgttgctggcctgg

SEQ ID NO: 5354 - DNA, 23 bp, Artificial Sequence
  HLA-A targeting gRNA
cgtgggggatggggaggggtcgg

SEQ ID NO: 5355 - DNA, 23 bp, Artificial Sequence
  HLA-A targeting gRNA
cgtgtcccggcccggcagcgggg

SEQ ID NO: 5356 - DNA, 23 bp, Artificial Sequence
  HLA-A targeting gRNA
cgtgtcccggcctggccgcgggg

SEQ ID NO: 5357 - DNA, 23 bp, Artificial Sequence
  HLA-A targeting gRNA
cgtgtccgcggcggtccaggagg

SEQ ID NO: 5358 - DNA, 23 bp, Artificial Sequence
  HLA-A targeting gRNA
cgtgtcctggcccggccgcgggg

SEQ ID NO: 5359 - DNA, 23 bp, Artificial Sequence
  HLA-A targeting gRNA
cgtgtcgtccacatagcccacgg

SEQ ID NO: 5360 - DNA, 23 bp, Artificial Sequence
  HLA-A targeting gRNA
cgtgtttcctgatcctgccctgg

SEQ ID NO: 5361 - DNA, 23 bp, Artificial Sequence
  HLA-A targeting gRNA
cgtgtttcctgatcctgccttgg

SEQ ID NO: 5362 - DNA, 23 bp, Artificial Sequence
  HLA-A targeting gRNA
cgttctcaggatggtcacatggg

SEQ ID NO: 5363 - DNA, 23 bp, Artificial Sequence
  HLA-A targeting gRNA
cgttgctggcctggctgtcctgg

SEQ ID NO: 5364 - DNA, 23 bp, Artificial Sequence
  HLA-A targeting gRNA
cgttggacaggaggaattatggg

SEQ ID NO: 5365 - DNA, 23 bp, Artificial Sequence
  HLA-A targeting gRNA
cgtttctggcccagctgtcctgg

SEQ ID NO: 5366 - DNA, 23 bp, Artificial Sequence
  HLA-A targeting gRNA
ctaactggtcatgcccgcggagg

SEQ ID NO: 5367 - DNA, 23 bp, Artificial Sequence
  HLA-A targeting gRNA
ctaactggttatacccgcggagg

SEQ ID NO: 5368 - DNA, 23 bp, Artificial Sequence
  HLA-A targeting gRNA
ctaactggttatgcccacggagg

SEQ ID NO: 5369 - DNA, 23 bp, Artificial Sequence
  HLA-A targeting gRNA
ctaactggttatgcccgcggagg

SEQ ID NO: 5370 - DNA, 23 bp, Artificial Sequence
  HLA-A targeting gRNA
ctaagccgcggtgtccgccgcgg

SEQ ID NO: 5371 - DNA, 23 bp, Artificial Sequence
  HLA-A targeting gRNA
ctaccgggagggcctgtgcgtgg

SEQ ID NO: 5372 - DNA, 23 bp, Artificial Sequence
  HLA-A targeting gRNA
ctacctggaggacacgtgcgtgg

SEQ ID NO: 5373 - DNA, 23 bp, Artificial Sequence
  HLA-A targeting gRNA
ctacctggagggaacgtgcgtgg

SEQ ID NO: 5374 - DNA, 23 bp, Artificial Sequence
  HLA-A targeting gRNA
ctacctggagggcaagtgcgtgg

SEQ ID NO: 5375 - DNA, 23 bp, Artificial Sequence
  HLA-A targeting gRNA
ctacctggagggcacgcgcgtgg

SEQ ID NO: 5376 - DNA, 23 bp, Artificial Sequence
  HLA-A targeting gRNA
ctacctggagggcacgtacgtgg

SEQ ID NO: 5377 - DNA, 23 bp, Artificial Sequence
  HLA-A targeting gRNA
ctacctggagggcacgtgagtgg

SEQ ID NO: 5378 - DNA, 23 bp, Artificial Sequence
  HLA-A targeting gRNA
ctacctggagggcacgtgcatgg

SEQ ID NO: 5379 - DNA, 23 bp, Artificial Sequence
  HLA-A targeting gRNA
ctacctggagggcacgtgtgtgg

SEQ ID NO: 5380 - DNA, 23 bp, Artificial Sequence
  HLA-A targeting gRNA
ctacctggagggcacgttcgtgg

SEQ ID NO: 5381 - DNA, 23 bp, Artificial Sequence
  HLA-A targeting gRNA
ctacctggagggcctgtgcgagg

SEQ ID NO: 5382 - DNA, 23 bp, Artificial Sequence
  HLA-A targeting gRNA
ctacctggagggcctgtgtgtgg

SEQ ID NO: 5383 - DNA, 23 bp, Artificial Sequence
  HLA-A targeting gRNA
ctacctggagggtctgtgcgtgg

SEQ ID NO: 5384 - DNA, 23 bp, Artificial Sequence
  HLA-A targeting gRNA
ctacctggtgggcacgtgcgtgg

SEQ ID NO: 5385 - DNA, 23 bp, Artificial Sequence
  HLA-A targeting gRNA
ctacgccgcgagtccaagagggg

SEQ ID NO: 5386 - DNA, 23 bp, Artificial Sequence
  HLA-A targeting gRNA
ctacggagatcacactgacctgg

SEQ ID NO: 5387 - DNA, 23 bp, Artificial Sequence
  HLA-A targeting gRNA
ctacgtggacgacacgctgttgg

SEQ ID NO: 5388 - DNA, 23 bp, Artificial Sequence
  HLA-A targeting gRNA
ctagacacccgacacccaatggg

SEQ ID NO: 5389 - DNA, 23 bp, Artificial Sequence
  HLA-A targeting gRNA
ctagagactcgaggagacccggg

SEQ ID NO: 5390 - DNA, 23 bp, Artificial Sequence
  HLA-A targeting gRNA
ctagagtgggcgggggggcgggg

SEQ ID NO: 5391 - DNA, 23 bp, Artificial Sequence
  HLA-A targeting gRNA
ctagagtgggcggggggggcggg

SEQ ID NO: 5392 - DNA, 23 bp, Artificial Sequence
  HLA-A targeting gRNA
ctagagtgggcgggggggggtgg

SEQ ID NO: 5393 - DNA, 23 bp, Artificial Sequence
  HLA-A targeting gRNA
ctagagtgggcggggggggtggg

SEQ ID NO: 5394 - DNA, 23 bp, Artificial Sequence
  HLA-A targeting gRNA
ctagagtgggtgggggtggcggg

SEQ ID NO: 5395 - DNA, 23 bp, Artificial Sequence
  HLA-A targeting gRNA
ctagatatccaatacccaatggg

SEQ ID NO: 5396 - DNA, 23 bp, Artificial Sequence
  HLA-A targeting gRNA
ctagatatccgacacccaatggg

SEQ ID NO: 5397 - DNA, 23 bp, Artificial Sequence
  HLA-A targeting gRNA
ctaggacaaccaggacagccagg

SEQ ID NO: 5398 - DNA, 23 bp, Artificial Sequence
  HLA-A targeting gRNA
ctaggacagccaggacagccagg

SEQ ID NO: 5399 - DNA, 23 bp, Artificial Sequence
  HLA-A targeting gRNA
ctaggacagctaggacaaccagg

SEQ ID NO: 5400 - DNA, 23 bp, Artificial Sequence
  HLA-A targeting gRNA
ctaggacagctaggacagccagg

SEQ ID NO: 5401 - DNA, 23 bp, Artificial Sequence
  HLA-A targeting gRNA
ctagggctctctccggtcgaggg

SEQ ID NO: 5402 - DNA, 23 bp, Artificial Sequence
  HLA-A targeting gRNA
ctatctcctgtagatctcccggg

SEQ ID NO: 5403 - DNA, 23 bp, Artificial Sequence
  HLA-A targeting gRNA
ctatgtcccggcccggccgcggg

SEQ ID NO: 5404 - DNA, 23 bp, Artificial Sequence
  HLA-A targeting gRNA
ctatgtcgggtccttcttccagg

SEQ ID NO: 5405 - DNA, 23 bp, Artificial Sequence
  HLA-A targeting gRNA
ctcaaggagtgggagcctggggg

SEQ ID NO: 5406 - DNA, 23 bp, Artificial Sequence
  HLA-A targeting gRNA
ctcacactcaatgtgtctgaagg

SEQ ID NO: 5407 - DNA, 23 bp, Artificial Sequence
  HLA-A targeting gRNA
ctcacgctcaatgtgtttaaagg

SEQ ID NO: 5408 - DNA, 23 bp, Artificial Sequence
  HLA-A targeting gRNA
ctcacgctcaatgtgtttgaagg

SEQ ID NO: 5409 - DNA, 23 bp, Artificial Sequence
  HLA-A targeting gRNA
ctcagatcacccagcccaagtgg

SEQ ID NO: 5410 - DNA, 23 bp, Artificial Sequence
  HLA-A targeting gRNA
ctcagatcacccagcgcaaatgg

SEQ ID NO: 5411 - DNA, 23 bp, Artificial Sequence
  HLA-A targeting gRNA
ctcagatcacccagcgtaagtgg

SEQ ID NO: 5412 - DNA, 23 bp, Artificial Sequence
  HLA-A targeting gRNA
ctcagatcacccagctcaagtgg

SEQ ID NO: 5413 - DNA, 23 bp, Artificial Sequence
  HLA-A targeting gRNA
ctcagatcatccagcgcaagtgg

SEQ ID NO: 5414 - DNA, 23 bp, Artificial Sequence
  HLA-A targeting gRNA
ctcagatctcccagcgcaagtgg

SEQ ID NO: 5415 - DNA, 23 bp, Artificial Sequence
  HLA-A targeting gRNA
ctcagcccctcctcacccccagg

SEQ ID NO: 5416 - DNA, 23 bp, Artificial Sequence
  HLA-A targeting gRNA
ctcagcccctcctcgcccccagg

SEQ ID NO: 5417 - DNA, 23 bp, Artificial Sequence
  HLA-A targeting gRNA
ctcagcccctcctcgctcccagg

SEQ ID NO: 5418 - DNA, 23 bp, Artificial Sequence
  HLA-A targeting gRNA
ctcagcccctcctctcccccagg

SEQ ID NO: 5419 - DNA, 23 bp, Artificial Sequence
  HLA-A targeting gRNA
ctcagcccctcctggcccccagg

SEQ ID NO: 5420 - DNA, 23 bp, Artificial Sequence
  HLA-A targeting gRNA
ctcagccctgacccagctgaagg

SEQ ID NO: 5421 - DNA, 23 bp, Artificial Sequence
  HLA-A targeting gRNA
ctcagccctgacccggctgaagg

SEQ ID NO: 5422 - DNA, 23 bp, Artificial Sequence
  HLA-A targeting gRNA
ctcagccctgacctggctgaagg

SEQ ID NO: 5423 - DNA, 23 bp, Artificial Sequence
  HLA-A targeting gRNA
ctcagctcctcctcgcccccagg

SEQ ID NO: 5424 - DNA, 23 bp, Artificial Sequence
  HLA-A targeting gRNA
ctcaggagacgtgggacaggagg

SEQ ID NO: 5425 - DNA, 23 bp, Artificial Sequence
  HLA-A targeting gRNA
ctcaggctgcatgtaagtgatgg

SEQ ID NO: 5426 - DNA, 23 bp, Artificial Sequence
  HLA-A targeting gRNA
ctcaggctgcgtgtaaatgatgg

SEQ ID NO: 5427 - DNA, 23 bp, Artificial Sequence
  HLA-A targeting gRNA
ctcaggctgcgtgtaagtgatgg

SEQ ID NO: 5428 - DNA, 23 bp, Artificial Sequence
  HLA-A targeting gRNA
ctcaggctgcgtgtaagtggtgg

SEQ ID NO: 5429 - DNA, 23 bp, Artificial Sequence
  HLA-A targeting gRNA
ctcagggaaaccagaagtcctgg

SEQ ID NO: 5430 - DNA, 23 bp, Artificial Sequence
  HLA-A targeting gRNA
ctcagggaaagcagaagtcctgg

SEQ ID NO: 5431 - DNA, 23 bp, Artificial Sequence
  HLA-A targeting gRNA
ctcagggtctcaggctccaaggg

SEQ ID NO: 5432 - DNA, 23 bp, Artificial Sequence
  HLA-A targeting gRNA
ctcagggtctcaggctccgaggg

SEQ ID NO: 5433 - DNA, 23 bp, Artificial Sequence
  HLA-A targeting gRNA
ctcaggtagggaaggggtgaggg

SEQ ID NO: 5434 - DNA, 23 bp, Artificial Sequence
  HLA-A targeting gRNA
ctcaggttgcgtgtaagtgatgg

SEQ ID NO: 5435 - DNA, 23 bp, Artificial Sequence
  HLA-A targeting gRNA
ctcatactcaatgtgtctgaagg

SEQ ID NO: 5436 - DNA, 23 bp, Artificial Sequence
  HLA-A targeting gRNA
ctcatcccattctccattcaagg

SEQ ID NO: 5437 - DNA, 23 bp, Artificial Sequence
  HLA-A targeting gRNA
ctcatcccattttccattcaagg

SEQ ID NO: 5438 - DNA, 23 bp, Artificial Sequence
  HLA-A targeting gRNA
ctcatcccccacggacggcccgg

SEQ ID NO: 5439 - DNA, 23 bp, Artificial Sequence
  HLA-A targeting gRNA
ctcatcttcccttcctttcccgg

SEQ ID NO: 5440 - DNA, 23 bp, Artificial Sequence
  HLA-A targeting gRNA
ctcatgaagtgggagcctggggg

SEQ ID NO: 5441 - DNA, 23 bp, Artificial Sequence
  HLA-A targeting gRNA
ctcatgccattctccattcaagg

SEQ ID NO: 5442 - DNA, 23 bp, Artificial Sequence
  HLA-A targeting gRNA
ctcatgctcaatgtgtttgaagg

SEQ ID NO: 5443 - DNA, 23 bp, Artificial Sequence
  HLA-A targeting gRNA
ctcatggagagggagcctggggg

SEQ ID NO: 5444 - DNA, 23 bp, Artificial Sequence
  HLA-A targeting gRNA
ctcatggagtggaagcctggggg

SEQ ID NO: 5445 - DNA, 23 bp, Artificial Sequence
  HLA-A targeting gRNA
ctcatggagtgggaacctggggg

SEQ ID NO: 5446 - DNA, 23 bp, Artificial Sequence
  HLA-A targeting gRNA
ctcatggagtgggagactggggg

SEQ ID NO: 5447 - DNA, 23 bp, Artificial Sequence
  HLA-A targeting gRNA
ctccacaagctcggtgtcctggg

SEQ ID NO: 5448 - DNA, 23 bp, Artificial Sequence
  HLA-A targeting gRNA
ctccacagggtagaaacccaggg

SEQ ID NO: 5449 - DNA, 23 bp, Artificial Sequence
  HLA-A targeting gRNA
ctccacagggtagaagcccaggg

SEQ ID NO: 5450 - DNA, 23 bp, Artificial Sequence
  HLA-A targeting gRNA
ctcccagcgcaagtgggaggcgg

SEQ ID NO: 5451 - DNA, 23 bp, Artificial Sequence
  HLA-A targeting gRNA
ctcccagcgcaagttggaggcgg

SEQ ID NO: 5452 - DNA, 23 bp, Artificial Sequence
  HLA-A targeting gRNA
ctccccagacgccgagatgcggg

SEQ ID NO: 5453 - DNA, 23 bp, Artificial Sequence
  HLA-A targeting gRNA
ctccccagaggccgagatgcggg

SEQ ID NO: 5454 - DNA, 23 bp, Artificial Sequence
  HLA-A targeting gRNA
ctccccagggtagaagcccaggg

SEQ ID NO: 5455 - DNA, 23 bp, Artificial Sequence
  HLA-A targeting gRNA
ctcccgagagcagcaggaggagg

SEQ ID NO: 5456 - DNA, 23 bp, Artificial Sequence
  HLA-A targeting gRNA
ctcccgagagcagcaggatgagg

SEQ ID NO: 5457 - DNA, 23 bp, Artificial Sequence
  HLA-A targeting gRNA
ctcccgtagatctcccggcatgg

SEQ ID NO: 5458 - DNA, 23 bp, Artificial Sequence
  HLA-A targeting gRNA
ctcccgtagatctcccgggatgg

SEQ ID NO: 5459 - DNA, 23 bp, Artificial Sequence
  HLA-A targeting gRNA
ctccctccttttccacctgtggg

SEQ ID NO: 5460 - DNA, 23 bp, Artificial Sequence
  HLA-A targeting gRNA
ctccgatgaccacaactgctagg

SEQ ID NO: 5461 - DNA, 23 bp, Artificial Sequence
  HLA-A targeting gRNA
ctccgcagacacctgaagaatgg

SEQ ID NO: 5462 - DNA, 23 bp, Artificial Sequence
  HLA-A targeting gRNA
ctccgcagatacctgaagaaagg

SEQ ID NO: 5463 - DNA, 23 bp, Artificial Sequence
  HLA-A targeting gRNA
ctccgcagatacctgaagaatgg

SEQ ID NO: 5464 - DNA, 23 bp, Artificial Sequence
  HLA-A targeting gRNA
ctccgcagatacctggagaaagg

SEQ ID NO: 5465 - DNA, 23 bp, Artificial Sequence
  HLA-A targeting gRNA
ctccgcagatacctggagaatgg

SEQ ID NO: 5466 - DNA, 23 bp, Artificial Sequence
  HLA-A targeting gRNA
ctccgcagatacctggggaacgg

SEQ ID NO: 5467 - DNA, 23 bp, Artificial Sequence
  HLA-A targeting gRNA
ctccgcagatatctggagaacgg

SEQ ID NO: 5468 - DNA, 23 bp, Artificial Sequence
  HLA-A targeting gRNA
ctccgcagggtagaaacccaggg

SEQ ID NO: 5469 - DNA, 23 bp, Artificial Sequence
  HLA-A targeting gRNA
ctccgcagggtagaagcacaggg

SEQ ID NO: 5470 - DNA, 23 bp, Artificial Sequence
  HLA-A targeting gRNA
ctccgcagggtagaagcccatgg

SEQ ID NO: 5471 - DNA, 23 bp, Artificial Sequence
  HLA-A targeting gRNA
ctccgcggatacctggagaacgg

SEQ ID NO: 5472 - DNA, 23 bp, Artificial Sequence
  HLA-A targeting gRNA
ctccggatgatgtgagaccctgg

SEQ ID NO: 5473 - DNA, 23 bp, Artificial Sequence
  HLA-A targeting gRNA
ctccggccgagggtctgggcggg

SEQ ID NO: 5474 - DNA, 23 bp, Artificial Sequence
  HLA-A targeting gRNA
ctccggtcgagggtctgggcggg

SEQ ID NO: 5475 - DNA, 23 bp, Artificial Sequence
  HLA-A targeting gRNA
ctccgtagggtagaagcccaggg

SEQ ID NO: 5476 - DNA, 23 bp, Artificial Sequence
  HLA-A targeting gRNA
ctcctaccggcgcggctccccgg

SEQ ID NO: 5477 - DNA, 23 bp, Artificial Sequence
  HLA-A targeting gRNA
ctcctagtcttggacccaaaagg

SEQ ID NO: 5478 - DNA, 23 bp, Artificial Sequence
  HLA-A targeting gRNA
ctcctatagatcgcccgggatgg

SEQ ID NO: 5479 - DNA, 23 bp, Artificial Sequence
  HLA-A targeting gRNA
ctcctatagatctcccgggatgg

SEQ ID NO: 5480 - DNA, 23 bp, Artificial Sequence
  HLA-A targeting gRNA
ctcctataggtcgccggggatgg

SEQ ID NO: 5481 - DNA, 23 bp, Artificial Sequence
  HLA-A targeting gRNA
ctcctcacattaggctaacaggg

SEQ ID NO: 5482 - DNA, 23 bp, Artificial Sequence
  HLA-A targeting gRNA
ctcctcacattatgctaacaggg

SEQ ID NO: 5483 - DNA, 23 bp, Artificial Sequence
  HLA-A targeting gRNA
ctcctcagacaccgagatgcggg

SEQ ID NO: 5484 - DNA, 23 bp, Artificial Sequence
  HLA-A targeting gRNA
ctcctcagacgccaagatgctgg

SEQ ID NO: 5485 - DNA, 23 bp, Artificial Sequence
  HLA-A targeting gRNA
ctcctcagacgccgagatgcggg

SEQ ID NO: 5486 - DNA, 23 bp, Artificial Sequence
  HLA-A targeting gRNA
ctcctcagacgccgagatgctgg

SEQ ID NO: 5487 - DNA, 23 bp, Artificial Sequence
  HLA-A targeting gRNA
ctcctcccagtcccctcataggg

SEQ ID NO: 5488 - DNA, 23 bp, Artificial Sequence
  HLA-A targeting gRNA
ctcctcccggcgcggctccccgg

SEQ ID NO: 5489 - DNA, 23 bp, Artificial Sequence
  HLA-A targeting gRNA
ctcctccctgcgccgctccccgg

SEQ ID NO: 5490 - DNA, 23 bp, Artificial Sequence
  HLA-A targeting gRNA
ctcctccctgcgcggctccccgg

SEQ ID NO: 5491 - DNA, 23 bp, Artificial Sequence
  HLA-A targeting gRNA
ctcctccctgcgcggcttcccgg

SEQ ID NO: 5492 - DNA, 23 bp, Artificial Sequence
  HLA-A targeting gRNA
ctcctccctgtcccctcacaggg

SEQ ID NO: 5493 - DNA, 23 bp, Artificial Sequence
  HLA-A targeting gRNA
ctcctcctgctgctctcgggagg

SEQ ID NO: 5494 - DNA, 23 bp, Artificial Sequence
  HLA-A targeting gRNA
ctcctcgtcttggaaccaaaagg

SEQ ID NO: 5495 - DNA, 23 bp, Artificial Sequence
  HLA-A targeting gRNA
ctcctcgtcttggacccaaaagg

SEQ ID NO: 5496 - DNA, 23 bp, Artificial Sequence
  HLA-A targeting gRNA
ctcctcgtggaaggccatcccgg

SEQ ID NO: 5497 - DNA, 23 bp, Artificial Sequence
  HLA-A targeting gRNA
ctcctcgtgggaggccatcccgg

SEQ ID NO: 5498 - DNA, 23 bp, Artificial Sequence
  HLA-A targeting gRNA
ctcctcgtgggaggccatgccgg

SEQ ID NO: 5499 - DNA, 23 bp, Artificial Sequence
  HLA-A targeting gRNA
ctcctggaccgccgcggacaagg

SEQ ID NO: 5500 - DNA, 23 bp, Artificial Sequence
  HLA-A targeting gRNA
ctcctggaccgccgcggacacgg

SEQ ID NO: 5501 - DNA, 23 bp, Artificial Sequence
  HLA-A targeting gRNA
ctcctggaccgcggcggacacgg

SEQ ID NO: 5502 - DNA, 23 bp, Artificial Sequence
  HLA-A targeting gRNA
ctcctggaccgctgcggacacgg

SEQ ID NO: 5503 - DNA, 23 bp, Artificial Sequence
  HLA-A targeting gRNA
ctcctggactgccgcggacacgg

SEQ ID NO: 5504 - DNA, 23 bp, Artificial Sequence
  HLA-A targeting gRNA
ctcctggattgccgcggacacgg

SEQ ID NO: 5505 - DNA, 23 bp, Artificial Sequence
  HLA-A targeting gRNA
ctcctgtagatctcccgggatgg

SEQ ID NO: 5506 - DNA, 23 bp, Artificial Sequence
  HLA-A targeting gRNA
ctcctgtccaacgtctcctgcgg

SEQ ID NO: 5507 - DNA, 23 bp, Artificial Sequence
  HLA-A targeting gRNA
ctcctgtcccacgtctcctgagg

SEQ ID NO: 5508 - DNA, 23 bp, Artificial Sequence
  HLA-A targeting gRNA
ctcctgtcccacgtctcctgcgg

SEQ ID NO: 5509 - DNA, 23 bp, Artificial Sequence
  HLA-A targeting gRNA
ctcctgtcccacgtctcctgtgg

SEQ ID NO: 5510 - DNA, 23 bp, Artificial Sequence
  HLA-A targeting gRNA
ctcgacgggcgcctcctccgcgg

SEQ ID NO: 5511 - DNA, 23 bp, Artificial Sequence
  HLA-A targeting gRNA
ctcgcacaggccctccaggtagg

SEQ ID NO: 5512 - DNA, 23 bp, Artificial Sequence
  HLA-A targeting gRNA
ctcggggaggatctcagaccggg

SEQ ID NO: 5513 - DNA, 23 bp, Artificial Sequence
  HLA-A targeting gRNA
ctcgggggacgggctgaccacgg

SEQ ID NO: 5514 - DNA, 23 bp, Artificial Sequence
  HLA-A targeting gRNA
ctcggggtggatctcagacccgg

SEQ ID NO: 5515 - DNA, 23 bp, Artificial Sequence
  HLA-A targeting gRNA
ctcggggtggatctcagaccggg

SEQ ID NO: 5516 - DNA, 23 bp, Artificial Sequence
  HLA-A targeting gRNA
ctcggggtggatctcagacgggg

SEQ ID NO: 5517 - DNA, 23 bp, Artificial Sequence
  HLA-A targeting gRNA
ctctagaacccgacacccaatgg

SEQ ID NO: 5518 - DNA, 23 bp, Artificial Sequence
  HLA-A targeting gRNA
ctctagaatccgacacccaatgg

SEQ ID NO: 5519 - DNA, 23 bp, Artificial Sequence
  HLA-A targeting gRNA
ctctcaactgctccgcctcacgg

SEQ ID NO: 5520 - DNA, 23 bp, Artificial Sequence
  HLA-A targeting gRNA
ctctcagctgctccgccacacgg

SEQ ID NO: 5521 - DNA, 23 bp, Artificial Sequence
  HLA-A targeting gRNA
ctctcagctgctccgccacccgg

SEQ ID NO: 5522 - DNA, 23 bp, Artificial Sequence
  HLA-A targeting gRNA
ctctcagctgctccgccccacgg

SEQ ID NO: 5523 - DNA, 23 bp, Artificial Sequence
  HLA-A targeting gRNA
ctctcagctgctccgccgcacgg

SEQ ID NO: 5524 - DNA, 23 bp, Artificial Sequence
  HLA-A targeting gRNA
ctctcagctgctccgccgtacgg

SEQ ID NO: 5525 - DNA, 23 bp, Artificial Sequence
  HLA-A targeting gRNA
ctctcagctgctccgcctcacgg

SEQ ID NO: 5526 - DNA, 23 bp, Artificial Sequence
  HLA-A targeting gRNA
ctctcagctgctcggccgcacgg

SEQ ID NO: 5527 - DNA, 23 bp, Artificial Sequence
  HLA-A targeting gRNA
ctctccactgctccgccgcacgg

SEQ ID NO: 5528 - DNA, 23 bp, Artificial Sequence
  HLA-A targeting gRNA
ctctccactgctccgcctcacgg

SEQ ID NO: 5529 - DNA, 23 bp, Artificial Sequence
  HLA-A targeting gRNA
ctctccccatcccccacggacgg

SEQ ID NO: 5530 - DNA, 23 bp, Artificial Sequence
  HLA-A targeting gRNA
ctctccgctgctccgccacacgg

SEQ ID NO: 5531 - DNA, 23 bp, Artificial Sequence
  HLA-A targeting gRNA
ctctccgctgctccgcctcacgg

SEQ ID NO: 5532 - DNA, 23 bp, Artificial Sequence
  HLA-A targeting gRNA
ctctccgtcagtctgtgcctggg

SEQ ID NO: 5533 - DNA, 23 bp, Artificial Sequence
  HLA-A targeting gRNA
ctctccgttgctccgcctcacgg

SEQ ID NO: 5534 - DNA, 23 bp, Artificial Sequence
  HLA-A targeting gRNA
ctctcgccggtcgagggtctggg

SEQ ID NO: 5535 - DNA, 23 bp, Artificial Sequence
  HLA-A targeting gRNA
ctctcgccggtcgagggtttggg

SEQ ID NO: 5536 - DNA, 23 bp, Artificial Sequence
  HLA-A targeting gRNA
ctctcggtaagtctgcgcggagg

SEQ ID NO: 5537 - DNA, 23 bp, Artificial Sequence
  HLA-A targeting gRNA
ctctcggtaagtctgtgccttgg

SEQ ID NO: 5538 - DNA, 23 bp, Artificial Sequence
  HLA-A targeting gRNA
ctctcggtaagtctgtgtgttgg

SEQ ID NO: 5539 - DNA, 23 bp, Artificial Sequence
  HLA-A targeting gRNA
ctctcggtacgtctgtgtgttgg

SEQ ID NO: 5540 - DNA, 23 bp, Artificial Sequence
  HLA-A targeting gRNA
ctctcggtcagcctgtgtgttgg

SEQ ID NO: 5541 - DNA, 23 bp, Artificial Sequence
  HLA-A targeting gRNA
ctctcggtcagtctgtgcctggg

SEQ ID NO: 5542 - DNA, 23 bp, Artificial Sequence
  HLA-A targeting gRNA
ctctcggtcagtctgtgccttgg

SEQ ID NO: 5543 - DNA, 23 bp, Artificial Sequence
  HLA-A targeting gRNA
ctctcggtcagtctgtgtgttgg

SEQ ID NO: 5544 - DNA, 23 bp, Artificial Sequence
  HLA-A targeting gRNA
ctctcgttaagtctgtgtgttgg

SEQ ID NO: 5545 - DNA, 23 bp, Artificial Sequence
  HLA-A targeting gRNA
ctctctccggccgagggtctggg

SEQ ID NO: 5546 - DNA, 23 bp, Artificial Sequence
  HLA-A targeting gRNA
ctctctccggtcgagggtctggg

SEQ ID NO: 5547 - DNA, 23 bp, Artificial Sequence
  HLA-A targeting gRNA
ctctctgcggtcgaggttctggg

SEQ ID NO: 5548 - DNA, 23 bp, Artificial Sequence
  HLA-A targeting gRNA
ctctctgctgctccgccgcacgg

SEQ ID NO: 5549 - DNA, 23 bp, Artificial Sequence
  HLA-A targeting gRNA
ctctgcactgctccgcctcacgg

SEQ ID NO: 5550 - DNA, 23 bp, Artificial Sequence
  HLA-A targeting gRNA
ctctgccaagtgtgagaccctgg

SEQ ID NO: 5551 - DNA, 23 bp, Artificial Sequence
  HLA-A targeting gRNA
ctctggaaggtgtgagaccctgg

SEQ ID NO: 5552 - DNA, 23 bp, Artificial Sequence
  HLA-A targeting gRNA
ctctggagagtgtgagaccctgg

SEQ ID NO: 5553 - DNA, 23 bp, Artificial Sequence
  HLA-A targeting gRNA
ctctggaggatgtgagaccctgg

SEQ ID NO: 5554 - DNA, 23 bp, Artificial Sequence
  HLA-A targeting gRNA
ctctggagggtatgagaccctgg

SEQ ID NO: 5555 - DNA, 23 bp, Artificial Sequence
  HLA-A targeting gRNA
ctctggagggtgtgagaccctgg

SEQ ID NO: 5556 - DNA, 23 bp, Artificial Sequence
  HLA-A targeting gRNA
ctctggatgatgtgagaccctgg

SEQ ID NO: 5557 - DNA, 23 bp, Artificial Sequence
  HLA-A targeting gRNA
ctctggatggtgtgagaccctgg

SEQ ID NO: 5558 - DNA, 23 bp, Artificial Sequence
  HLA-A targeting gRNA
ctctggcgggtgtgagaccctgg

SEQ ID NO: 5559 - DNA, 23 bp, Artificial Sequence
  HLA-A targeting gRNA
ctctggggagaatgtgagtccgg

SEQ ID NO: 5560 - DNA, 23 bp, Artificial Sequence
  HLA-A targeting gRNA
ctctgggtctcaagctcccaggg

SEQ ID NO: 5561 - DNA, 23 bp, Artificial Sequence
  HLA-A targeting gRNA
ctctgtcctgctccgccacacgg

SEQ ID NO: 5562 - DNA, 23 bp, Artificial Sequence
  HLA-A targeting gRNA
ctctgtcctgctccgccatacgg

SEQ ID NO: 5563 - DNA, 23 bp, Artificial Sequence
  HLA-A targeting gRNA
ctctgtcctgctccgccgcacgg

SEQ ID NO: 5564 - DNA, 23 bp, Artificial Sequence
  HLA-A targeting gRNA
ctcttagctgctccgccacacgg

SEQ ID NO: 5565 - DNA, 23 bp, Artificial Sequence
  HLA-A targeting gRNA
ctcttctctctagacaattaagg

SEQ ID NO: 5566 - DNA, 23 bp, Artificial Sequence
  HLA-A targeting gRNA
ctcttgaagtcacaaaggaaagg

SEQ ID NO: 5567 - DNA, 23 bp, Artificial Sequence
  HLA-A targeting gRNA
ctcttgaagtcacaaaggagagg

SEQ ID NO: 5568 - DNA, 23 bp, Artificial Sequence
  HLA-A targeting gRNA
ctcttgaagtcacaaaggggagg

SEQ ID NO: 5569 - DNA, 23 bp, Artificial Sequence
  HLA-A targeting gRNA
ctcttgggtccaagactaggagg

SEQ ID NO: 5570 - DNA, 23 bp, Artificial Sequence
  HLA-A targeting gRNA
ctcttgtcccacatctcctgcgg

SEQ ID NO: 5571 - DNA, 23 bp, Artificial Sequence
  HLA-A targeting gRNA
ctcttgtcccacatctcctgtgg

SEQ ID NO: 5572 - DNA, 23 bp, Artificial Sequence
  HLA-A targeting gRNA
ctgaaaacgaaaccgggtaaagg

SEQ ID NO: 5573 - DNA, 23 bp, Artificial Sequence
  HLA-A targeting gRNA
ctgaagcaactgccctcctaagg

SEQ ID NO: 5574 - DNA, 23 bp, Artificial Sequence
  HLA-A targeting gRNA
ctgaagggctccaggacttctgg

SEQ ID NO: 5575 - DNA, 23 bp, Artificial Sequence
  HLA-A targeting gRNA
ctgaccacgggggcggggccagg

SEQ ID NO: 5576 - DNA, 23 bp, Artificial Sequence
  HLA-A targeting gRNA
ctgaccatgaggtcaccctgagg

SEQ ID NO: 5577 - DNA, 23 bp, Artificial Sequence
  HLA-A targeting gRNA
ctgaccgcgagggctgggccagg

SEQ ID NO: 5578 - DNA, 23 bp, Artificial Sequence
  HLA-A targeting gRNA
ctgaccgcggggccggggccagg

SEQ ID NO: 5579 - DNA, 23 bp, Artificial Sequence
  HLA-A targeting gRNA
ctgaccgcggggcctaggccagg

SEQ ID NO: 5580 - DNA, 23 bp, Artificial Sequence
  HLA-A targeting gRNA
ctgaccgcggggcctgggccagg

SEQ ID NO: 5581 - DNA, 23 bp, Artificial Sequence
  HLA-A targeting gRNA
ctgaccgcgggggcggggccagg

SEQ ID NO: 5582 - DNA, 23 bp, Artificial Sequence
  HLA-A targeting gRNA
ctgacctgagtggaggccgaagg

SEQ ID NO: 5583 - DNA, 23 bp, Artificial Sequence
  HLA-A targeting gRNA
ctgacctgagtggaggctgcagg

SEQ ID NO: 5584 - DNA, 23 bp, Artificial Sequence
  HLA-A targeting gRNA
ctgacgctcaatgtgtttgaagg

SEQ ID NO: 5585 - DNA, 23 bp, Artificial Sequence
  HLA-A targeting gRNA
ctgagaacggacaggacacctgg

SEQ ID NO: 5586 - DNA, 23 bp, Artificial Sequence
  HLA-A targeting gRNA
ctgagaatggacaggacacctgg

SEQ ID NO: 5587 - DNA, 23 bp, Artificial Sequence
  HLA-A targeting gRNA
ctgagaatggacgggacacctgg

SEQ ID NO: 5588 - DNA, 23 bp, Artificial Sequence
  HLA-A targeting gRNA
ctgagaatgggcaggacacctgg

SEQ ID NO: 5589 - DNA, 23 bp, Artificial Sequence
  HLA-A targeting gRNA
ctgagacagctgtcttgtgaggg

SEQ ID NO: 5590 - DNA, 23 bp, Artificial Sequence
  HLA-A targeting gRNA
ctgagccgccgtgtccgcagcgg

SEQ ID NO: 5591 - DNA, 23 bp, Artificial Sequence
  HLA-A targeting gRNA
ctgagccgccgtgtccgccgcgg

SEQ ID NO: 5592 - DNA, 23 bp, Artificial Sequence
  HLA-A targeting gRNA
ctgagccgccgtgtccgcggcgg

SEQ ID NO: 5593 - DNA, 23 bp, Artificial Sequence
  HLA-A targeting gRNA
ctgagccgccttgtccgcggcgg

SEQ ID NO: 5594 - DNA, 23 bp, Artificial Sequence
  HLA-A targeting gRNA
ctgagccgcggtatccgcggcgg

SEQ ID NO: 5595 - DNA, 23 bp, Artificial Sequence
  HLA-A targeting gRNA
ctgagccgcggtgtccgcagcgg

SEQ ID NO: 5596 - DNA, 23 bp, Artificial Sequence
  HLA-A targeting gRNA
ctgagccgcggtgtccgccgcgg

SEQ ID NO: 5597 - DNA, 23 bp, Artificial Sequence
  HLA-A targeting gRNA
ctgagccgcggtgtccgcggcgg

SEQ ID NO: 5598 - DNA, 23 bp, Artificial Sequence
  HLA-A targeting gRNA
ctgagccgctgtgtccccggcgg

SEQ ID NO: 5599 - DNA, 23 bp, Artificial Sequence
  HLA-A targeting gRNA
ctgagccgctgtgtccgcggcgg

SEQ ID NO: 5600 - DNA, 23 bp, Artificial Sequence
  HLA-A targeting gRNA
ctgagtccgggtgggtgactggg

SEQ ID NO: 5601 - DNA, 23 bp, Artificial Sequence
  HLA-A targeting gRNA
ctgagtccgggtgggtgcgtggg

SEQ ID NO: 5602 - DNA, 23 bp, Artificial Sequence
  HLA-A targeting gRNA
ctgagttttcttgtcccactggg

SEQ ID NO: 5603 - DNA, 23 bp, Artificial Sequence
  HLA-A targeting gRNA
ctgcaacgcgcgggtaccagggg

SEQ ID NO: 5604 - DNA, 23 bp, Artificial Sequence
  HLA-A targeting gRNA
ctgcacaaaagagtaagtgctgg

SEQ ID NO: 5605 - DNA, 23 bp, Artificial Sequence
  HLA-A targeting gRNA
ctgcacaaaagagtaagttctgg

SEQ ID NO: 5606 - DNA, 23 bp, Artificial Sequence
  HLA-A targeting gRNA
ctgcaccctgagatggagtaagg

SEQ ID NO: 5607 - DNA, 23 bp, Artificial Sequence
  HLA-A targeting gRNA
ctgcagagcgcgggtaccagggg

SEQ ID NO: 5608 - DNA, 23 bp, Artificial Sequence
  HLA-A targeting gRNA
ctgcagcacgcgggtaccagggg

SEQ ID NO: 5609 - DNA, 23 bp, Artificial Sequence
  HLA-A targeting gRNA
ctgcagcctccactcaggtcagg

SEQ ID NO: 5610 - DNA, 23 bp, Artificial Sequence
  HLA-A targeting gRNA
ctgcagcgcgcaggtaccagggg

SEQ ID NO: 5611 - DNA, 23 bp, Artificial Sequence
  HLA-A targeting gRNA
ctgcagcgcgcgggtaccaaggg

SEQ ID NO: 5612 - DNA, 23 bp, Artificial Sequence
  HLA-A targeting gRNA
ctgcatcccagtaatgaggcagg

SEQ ID NO: 5613 - DNA, 23 bp, Artificial Sequence
  HLA-A targeting gRNA
ctgcatgtaagtgatggcggtgg

SEQ ID NO: 5614 - DNA, 23 bp, Artificial Sequence
  HLA-A targeting gRNA
ctgccccacactcagtgtttggg

SEQ ID NO: 5615 - DNA, 23 bp, Artificial Sequence
  HLA-A targeting gRNA
ctgccccccagagcagcaggagg

SEQ ID NO: 5616 - DNA, 23 bp, Artificial Sequence
  HLA-A targeting gRNA
ctgccccctagagcagcaggagg

SEQ ID NO: 5617 - DNA, 23 bp, Artificial Sequence
  HLA-A targeting gRNA
ctgcctggagggcgagtgcgtgg

SEQ ID NO: 5618 - DNA, 23 bp, Artificial Sequence
  HLA-A targeting gRNA
ctgcggagatcacactgatctgg

SEQ ID NO: 5619 - DNA, 23 bp, Artificial Sequence
  HLA-A targeting gRNA
ctgcggtcgaggttctgggcggg

SEQ ID NO: 5620 - DNA, 23 bp, Artificial Sequence
  HLA-A targeting gRNA
ctgcgtccaggctggtgtctggg

SEQ ID NO: 5621 - DNA, 23 bp, Artificial Sequence
  HLA-A targeting gRNA
ctgcgtccaggctggtgtttggg

SEQ ID NO: 5622 - DNA, 23 bp, Artificial Sequence
  HLA-A targeting gRNA
ctgcgtccgggctggtgtctggg

SEQ ID NO: 5623 - DNA, 23 bp, Artificial Sequence
  HLA-A targeting gRNA
ctgcgtgtaaatgatggcggcgg

SEQ ID NO: 5624 - DNA, 23 bp, Artificial Sequence
  HLA-A targeting gRNA
ctgcgtgtaagtgatgccggtgg

SEQ ID NO: 5625 - DNA, 23 bp, Artificial Sequence
  HLA-A targeting gRNA
ctgcgtgtaagtgatggcagtgg

SEQ ID NO: 5626 - DNA, 23 bp, Artificial Sequence
  HLA-A targeting gRNA
ctgcgtgtaagtgatggcggcgg

SEQ ID NO: 5627 - DNA, 23 bp, Artificial Sequence
  HLA-A targeting gRNA
ctgcgtgtaagtgatggcggtgg

SEQ ID NO: 5628 - DNA, 23 bp, Artificial Sequence
  HLA-A targeting gRNA
ctgcgtgtaagtgatgggggcgg

SEQ ID NO: 5629 - DNA, 23 bp, Artificial Sequence
  HLA-A targeting gRNA
ctgcgtgtaagtgatgggggtgg

SEQ ID NO: 5630 - DNA, 23 bp, Artificial Sequence
  HLA-A targeting gRNA
ctgcgtgtaagtggtgggggtgg

SEQ ID NO: 5631 - DNA, 23 bp, Artificial Sequence
  HLA-A targeting gRNA
ctgctccacccacggcgcccggg

SEQ ID NO: 5632 - DNA, 23 bp, Artificial Sequence
  HLA-A targeting gRNA
ctgctctatccacggcgcccggg

SEQ ID NO: 5633 - DNA, 23 bp, Artificial Sequence
  HLA-A targeting gRNA
ctgctctatccatggcgcccagg

SEQ ID NO: 5634 - DNA, 23 bp, Artificial Sequence
  HLA-A targeting gRNA
ctgctctatccatggcgcccggg

SEQ ID NO: 5635 - DNA, 23 bp, Artificial Sequence
  HLA-A targeting gRNA
ctgctctatccatggctcccggg

SEQ ID NO: 5636 - DNA, 23 bp, Artificial Sequence
  HLA-A targeting gRNA
ctgctctctaggacaattaaggg

SEQ ID NO: 5637 - DNA, 23 bp, Artificial Sequence
  HLA-A targeting gRNA
ctgctgtctaggacaattaaggg

SEQ ID NO: 5638 - DNA, 23 bp, Artificial Sequence
  HLA-A targeting gRNA
ctgcttcccagtaatgaggcagg

SEQ ID NO: 5639 - DNA, 23 bp, Artificial Sequence
  HLA-A targeting gRNA
ctgcttcccagtaatgatgcagg

SEQ ID NO: 5640 - DNA, 23 bp, Artificial Sequence
  HLA-A targeting gRNA
ctggaagaaggacccgacacagg

SEQ ID NO: 5641 - DNA, 23 bp, Artificial Sequence
  HLA-A targeting gRNA
ctggaagaaggacccgacatagg

SEQ ID NO: 5642 - DNA, 23 bp, Artificial Sequence
  HLA-A targeting gRNA
ctggaagcaccatccacacatgg

SEQ ID NO: 5643 - DNA, 23 bp, Artificial Sequence
  HLA-A targeting gRNA
ctggaagcaccatccacacctgg

SEQ ID NO: 5644 - DNA, 23 bp, Artificial Sequence
  HLA-A targeting gRNA
ctggaagcaccatccacacgtgg

SEQ ID NO: 5645 - DNA, 23 bp, Artificial Sequence
  HLA-A targeting gRNA
ctggaccaactgccctcctaagg

SEQ ID NO: 5646 - DNA, 23 bp, Artificial Sequence
  HLA-A targeting gRNA
ctggaccaactgctctcctaagg

SEQ ID NO: 5647 - DNA, 23 bp, Artificial Sequence
  HLA-A targeting gRNA
ctggaccgccgcggacaaggcgg

SEQ ID NO: 5648 - DNA, 23 bp, Artificial Sequence
  HLA-A targeting gRNA
ctggaccgccgcggacacagcgg

SEQ ID NO: 5649 - DNA, 23 bp, Artificial Sequence
  HLA-A targeting gRNA
ctggaccgccgcggacaccgcgg

SEQ ID NO: 5650 - DNA, 23 bp, Artificial Sequence
  HLA-A targeting gRNA
ctggaccgccgcggacacggcgg

SEQ ID NO: 5651 - DNA, 23 bp, Artificial Sequence
  HLA-A targeting gRNA
ctggaccgccgcggataccgcgg

SEQ ID NO: 5652 - DNA, 23 bp, Artificial Sequence
  HLA-A targeting gRNA
ctggaccgccggggacacagcgg

SEQ ID NO: 5653 - DNA, 23 bp, Artificial Sequence
  HLA-A targeting gRNA
ctggaccgcggcggacaccgcgg

SEQ ID NO: 5654 - DNA, 23 bp, Artificial Sequence
  HLA-A targeting gRNA
ctggaccgcggcggacacggcgg

SEQ ID NO: 5655 - DNA, 23 bp, Artificial Sequence
  HLA-A targeting gRNA
ctggaccgctgcggacaccgcgg

SEQ ID NO: 5656 - DNA, 23 bp, Artificial Sequence
  HLA-A targeting gRNA
ctggaccgctgcggacacggcgg

SEQ ID NO: 5657 - DNA, 23 bp, Artificial Sequence
  HLA-A targeting gRNA
ctggactgccgcggacacggcgg

SEQ ID NO: 5658 - DNA, 23 bp, Artificial Sequence
  HLA-A targeting gRNA
ctggagcaactgccctcctaagg

SEQ ID NO: 5659 - DNA, 23 bp, Artificial Sequence
  HLA-A targeting gRNA
ctggagcccttcagcagggtcgg

SEQ ID NO: 5660 - DNA, 23 bp, Artificial Sequence
  HLA-A targeting gRNA
ctggagcgcgcgggtaccagggg

SEQ ID NO: 5661 - DNA, 23 bp, Artificial Sequence
  HLA-A targeting gRNA
ctggagcgcgctggtaccagggg

SEQ ID NO: 5662 - DNA, 23 bp, Artificial Sequence
  HLA-A targeting gRNA
ctggatagagcaggaggggccgg

SEQ ID NO: 5663 - DNA, 23 bp, Artificial Sequence
  HLA-A targeting gRNA
ctggatcgcggcggacaccgcgg

SEQ ID NO: 5664 - DNA, 23 bp, Artificial Sequence
  HLA-A targeting gRNA
ctggattgccgcggacacggcgg

SEQ ID NO: 5665 - DNA, 23 bp, Artificial Sequence
  HLA-A targeting gRNA
ctggccgcggggccggggccagg

SEQ ID NO: 5666 - DNA, 23 bp, Artificial Sequence
  HLA-A targeting gRNA
ctggcctggtctccacaagctgg

SEQ ID NO: 5667 - DNA, 23 bp, Artificial Sequence
  HLA-A targeting gRNA
ctggctgtcctagctgtcctagg

SEQ ID NO: 5668 - DNA, 23 bp, Artificial Sequence
  HLA-A targeting gRNA
ctgggaagcagcatccacacagg

SEQ ID NO: 5669 - DNA, 23 bp, Artificial Sequence
  HLA-A targeting gRNA
ctgggaagcagcatcctcacagg

SEQ ID NO: 5670 - DNA, 23 bp, Artificial Sequence
  HLA-A targeting gRNA
ctgggaagcagcatgcacacagg

SEQ ID NO: 5671 - DNA, 23 bp, Artificial Sequence
  HLA-A targeting gRNA
ctgggagctgaagtggtcggggg

SEQ ID NO: 5672 - DNA, 23 bp, Artificial Sequence
  HLA-A targeting gRNA
ctgggatgcagcatccacacagg

SEQ ID NO: 5673 - DNA, 23 bp, Artificial Sequence
  HLA-A targeting gRNA
ctgggcactgttgctgcctgggg

SEQ ID NO: 5674 - DNA, 23 bp, Artificial Sequence
  HLA-A targeting gRNA
ctgggcactgttgctggctgggg

SEQ ID NO: 5675 - DNA, 23 bp, Artificial Sequence
  HLA-A targeting gRNA
ctgggccagggtctcacacttgg

SEQ ID NO: 5676 - DNA, 23 bp, Artificial Sequence
  HLA-A targeting gRNA
ctgggccggtgagtgcgggtcgg

SEQ ID NO: 5677 - DNA, 23 bp, Artificial Sequence
  HLA-A targeting gRNA
ctgggcgccatggatagagcagg

SEQ ID NO: 5678 - DNA, 23 bp, Artificial Sequence
  HLA-A targeting gRNA
ctgggcggattccgcagcctcgg

SEQ ID NO: 5679 - DNA, 23 bp, Artificial Sequence
  HLA-A targeting gRNA
ctgggcgggtcccgcggcctcgg

SEQ ID NO: 5680 - DNA, 23 bp, Artificial Sequence
  HLA-A targeting gRNA
ctgggcgggtgagtgcgggtcgg

SEQ ID NO: 5681 - DNA, 23 bp, Artificial Sequence
  HLA-A targeting gRNA
ctgggcgggttccgcagcctcgg

SEQ ID NO: 5682 - DNA, 23 bp, Artificial Sequence
  HLA-A targeting gRNA
ctgggctgaccacgggggcgggg

SEQ ID NO: 5683 - DNA, 23 bp, Artificial Sequence
  HLA-A targeting gRNA
ctgggctgaccgcgagggctggg

SEQ ID NO: 5684 - DNA, 23 bp, Artificial Sequence
  HLA-A targeting gRNA
ctgggctgaccgcggggccgggg

SEQ ID NO: 5685 - DNA, 23 bp, Artificial Sequence
  HLA-A targeting gRNA
ctgggctgaccgcgggggcgggg

SEQ ID NO: 5686 - DNA, 23 bp, Artificial Sequence
  HLA-A targeting gRNA
ctggggagatcacactgacctgg

SEQ ID NO: 5687 - DNA, 23 bp, Artificial Sequence
  HLA-A targeting gRNA
ctggggagctgaagtggtcgggg

SEQ ID NO: 5688 - DNA, 23 bp, Artificial Sequence
  HLA-A targeting gRNA
ctggggagctgaagtggtctggg

SEQ ID NO: 5689 - DNA, 23 bp, Artificial Sequence
  HLA-A targeting gRNA
ctggggcggggctcgcgggacgg

SEQ ID NO: 5690 - DNA, 23 bp, Artificial Sequence
  HLA-A targeting gRNA
ctggggcggggctcgggggacgg

SEQ ID NO: 5691 - DNA, 23 bp, Artificial Sequence
  HLA-A targeting gRNA
ctggggcggggtggggcagaggg

SEQ ID NO: 5692 - DNA, 23 bp, Artificial Sequence
  HLA-A targeting gRNA
ctggggcggggttcgggggacgg

SEQ ID NO: 5693 - DNA, 23 bp, Artificial Sequence
  HLA-A targeting gRNA
ctggggctctcgccggtcgaggg

SEQ ID NO: 5694 - DNA, 23 bp, Artificial Sequence
  HLA-A targeting gRNA
ctggggctctctccggccgaggg

SEQ ID NO: 5695 - DNA, 23 bp, Artificial Sequence
  HLA-A targeting gRNA
ctggggctctctccggtcgaggg

SEQ ID NO: 5696 - DNA, 23 bp, Artificial Sequence
  HLA-A targeting gRNA
ctggggcttgaaaccccagtggg

SEQ ID NO: 5697 - DNA, 23 bp, Artificial Sequence
  HLA-A targeting gRNA
ctggggcttgaaacccccagtgg

SEQ ID NO: 5698 - DNA, 23 bp, Artificial Sequence
  HLA-A targeting gRNA
ctggggcttgaaactcccagtgg

SEQ ID NO: 5699 - DNA, 23 bp, Artificial Sequence
  HLA-A targeting gRNA
ctggggggggggggggcagaggg

SEQ ID NO: 5700 - DNA, 23 bp, Artificial Sequence
  HLA-A targeting gRNA
ctgggggtgggtggggcagaggg

SEQ ID NO: 5701 - DNA, 23 bp, Artificial Sequence
  HLA-A targeting gRNA
ctgggggtgggtggggcagtggg

SEQ ID NO: 5702 - DNA, 23 bp, Artificial Sequence
  HLA-A targeting gRNA
ctggggtaaggaggggaatgggg

SEQ ID NO: 5703 - DNA, 23 bp, Artificial Sequence
  HLA-A targeting gRNA
ctgggtcagggctgaggcttggg

SEQ ID NO: 5704 - DNA, 23 bp, Artificial Sequence
  HLA-A targeting gRNA
ctgggttttcttgtcccactggg

SEQ ID NO: 5705 - DNA, 23 bp, Artificial Sequence
  HLA-A targeting gRNA
ctgggttttcttgttccactggg

SEQ ID NO: 5706 - DNA, 23 bp, Artificial Sequence
  HLA-A targeting gRNA
ctgggttttgttgtcccactggg

SEQ ID NO: 5707 - DNA, 23 bp, Artificial Sequence
  HLA-A targeting gRNA
ctggtcacatgggtggtcctagg

SEQ ID NO: 5708 - DNA, 23 bp, Artificial Sequence
  HLA-A targeting gRNA
ctggtcatacccgcggaggaggg

SEQ ID NO: 5709 - DNA, 23 bp, Artificial Sequence
  HLA-A targeting gRNA
ctggtgagtgcggggtcggcagg

SEQ ID NO: 5710 - DNA, 23 bp, Artificial Sequence
  HLA-A targeting gRNA
ctggtgagtgcggggtcgggagg

SEQ ID NO: 5711 - DNA, 23 bp, Artificial Sequence
  HLA-A targeting gRNA
ctggttgtagtagcggagcaggg

SEQ ID NO: 5712 - DNA, 23 bp, Artificial Sequence
  HLA-A targeting gRNA
ctggttgtagtagcggagcgcgg

SEQ ID NO: 5713 - DNA, 23 bp, Artificial Sequence
  HLA-A targeting gRNA
ctggttgtcctagctgtcctagg

SEQ ID NO: 5714 - DNA, 23 bp, Artificial Sequence
  HLA-A targeting gRNA
ctggttgtcctagctgtccttgg

SEQ ID NO: 5715 - DNA, 23 bp, Artificial Sequence
  HLA-A targeting gRNA
ctgtaggacagctgcctgtgtgg

SEQ ID NO: 5716 - DNA, 23 bp, Artificial Sequence
  HLA-A targeting gRNA
ctgtgagtgcgaggttgggaggg

SEQ ID NO: 5717 - DNA, 23 bp, Artificial Sequence
  HLA-A targeting gRNA
ctgtgagtgcggggttaggaggg

SEQ ID NO: 5718 - DNA, 23 bp, Artificial Sequence
  HLA-A targeting gRNA
ctgtgagtgcggggttgggaggg

SEQ ID NO: 5719 - DNA, 23 bp, Artificial Sequence
  HLA-A targeting gRNA
ctgtgccccttccccacaccagg

SEQ ID NO: 5720 - DNA, 23 bp, Artificial Sequence
  HLA-A targeting gRNA
ctgtgccccttccccaccccagg

SEQ ID NO: 5721 - DNA, 23 bp, Artificial Sequence
  HLA-A targeting gRNA
ctgtgccccttccctaccccagg

SEQ ID NO: 5722 - DNA, 23 bp, Artificial Sequence
  HLA-A targeting gRNA
ctgtgtccaggctggcgtctggg

SEQ ID NO: 5723 - DNA, 23 bp, Artificial Sequence
  HLA-A targeting gRNA
ctgtgtcccggcccggccgcggg

SEQ ID NO: 5724 - DNA, 23 bp, Artificial Sequence
  HLA-A targeting gRNA
ctgtgtcccttccccaccccagg

SEQ ID NO: 5725 - DNA, 23 bp, Artificial Sequence
  HLA-A targeting gRNA
ctgtgtcgggtccttcttccagg

SEQ ID NO: 5726 - DNA, 23 bp, Artificial Sequence
  HLA-A targeting gRNA
ctgttccggtcccaatactccgg

SEQ ID NO: 5727 - DNA, 23 bp, Artificial Sequence
  HLA-A targeting gRNA
cttaattgtctagagagaagagg

SEQ ID NO: 5728 - DNA, 23 bp, Artificial Sequence
  HLA-A targeting gRNA
cttaccccagctcagggtgaggg

SEQ ID NO: 5729 - DNA, 23 bp, Artificial Sequence
  HLA-A targeting gRNA
cttactccatctcagggtgaggg

SEQ ID NO: 5730 - DNA, 23 bp, Artificial Sequence
  HLA-A targeting gRNA
cttactccatctcagggtgcagg

SEQ ID NO: 5731 - DNA, 23 bp, Artificial Sequence
  HLA-A targeting gRNA
cttagatcacccagcgcaagtgg

SEQ ID NO: 5732 - DNA, 23 bp, Artificial Sequence
  HLA-A targeting gRNA
cttaggagagcagttggtccagg

SEQ ID NO: 5733 - DNA, 23 bp, Artificial Sequence
  HLA-A targeting gRNA
cttaggagggcagttgcttcagg

SEQ ID NO: 5734 - DNA, 23 bp, Artificial Sequence
  HLA-A targeting gRNA
cttaggagggcagttggtccagg

SEQ ID NO: 5735 - DNA, 23 bp, Artificial Sequence
  HLA-A targeting gRNA
cttcaaacacattgagcatgagg

SEQ ID NO: 5736 - DNA, 23 bp, Artificial Sequence
  HLA-A targeting gRNA
cttcaaacacattgagcgtcagg

SEQ ID NO: 5737 - DNA, 23 bp, Artificial Sequence
  HLA-A targeting gRNA
cttcaaacacattgagcgtgagg

SEQ ID NO: 5738 - DNA, 23 bp, Artificial Sequence
  HLA-A targeting gRNA
cttcacaaaagagtaagtgctgg

SEQ ID NO: 5739 - DNA, 23 bp, Artificial Sequence
  HLA-A targeting gRNA
cttcacaacagagtaagtgctgg

SEQ ID NO: 5740 - DNA, 23 bp, Artificial Sequence
  HLA-A targeting gRNA
cttcagacacattgagtatgagg

SEQ ID NO: 5741 - DNA, 23 bp, Artificial Sequence
  HLA-A targeting gRNA
cttcagacacattgagtgtgagg

SEQ ID NO: 5742 - DNA, 23 bp, Artificial Sequence
  HLA-A targeting gRNA
cttcagccaggtcagggctgagg

SEQ ID NO: 5743 - DNA, 23 bp, Artificial Sequence
  HLA-A targeting gRNA
cttcagccgggtcagggctgagg

SEQ ID NO: 5744 - DNA, 23 bp, Artificial Sequence
  HLA-A targeting gRNA
cttcagctgggtcagggctgagg

SEQ ID NO: 5745 - DNA, 23 bp, Artificial Sequence
  HLA-A targeting gRNA
cttcatcaccgtgggctacgtgg

SEQ ID NO: 5746 - DNA, 23 bp, Artificial Sequence
  HLA-A targeting gRNA
cttcatcaccgtgggctatgtgg

SEQ ID NO: 5747 - DNA, 23 bp, Artificial Sequence
  HLA-A targeting gRNA
cttcatctcagtgcgctacgtgg

SEQ ID NO: 5748 - DNA, 23 bp, Artificial Sequence
  HLA-A targeting gRNA
cttcatctcagtgggctacgtgg

SEQ ID NO: 5749 - DNA, 23 bp, Artificial Sequence
  HLA-A targeting gRNA
cttcatctcagtgggttacgtgg

SEQ ID NO: 5750 - DNA, 23 bp, Artificial Sequence
  HLA-A targeting gRNA
cttcatggagtgggagcctgggg

SEQ ID NO: 5751 - DNA, 23 bp, Artificial Sequence
  HLA-A targeting gRNA
cttcatggagtgggaggctgggg

SEQ ID NO: 5752 - DNA, 23 bp, Artificial Sequence
  HLA-A targeting gRNA
cttcattaccgtgggctacgtgg

SEQ ID NO: 5753 - DNA, 23 bp, Artificial Sequence
  HLA-A targeting gRNA
cttcattgcagtgggctacgtgg

SEQ ID NO: 5754 - DNA, 23 bp, Artificial Sequence
  HLA-A targeting gRNA
cttccagaagtggacagctgtgg

SEQ ID NO: 5755 - DNA, 23 bp, Artificial Sequence
  HLA-A targeting gRNA
cttcccacaggtggaaaaggagg

SEQ ID NO: 5756 - DNA, 23 bp, Artificial Sequence
  HLA-A targeting gRNA
cttcccctgactcatgatgctgg

SEQ ID NO: 5757 - DNA, 23 bp, Artificial Sequence
  HLA-A targeting gRNA
cttcctcccagtcccctcacagg

SEQ ID NO: 5758 - DNA, 23 bp, Artificial Sequence
  HLA-A targeting gRNA
cttcctcccagtgccctcacagg

SEQ ID NO: 5759 - DNA, 23 bp, Artificial Sequence
  HLA-A targeting gRNA
cttcctcctacacatcatagcgg

SEQ ID NO: 5760 - DNA, 23 bp, Artificial Sequence
  HLA-A targeting gRNA
cttcctcctacacatcttagcgg

SEQ ID NO: 5761 - DNA, 23 bp, Artificial Sequence
  HLA-A targeting gRNA
cttcggcctccactcaggtcagg

SEQ ID NO: 5762 - DNA, 23 bp, Artificial Sequence
  HLA-A targeting gRNA
cttcggtaaggagggggatgagg

SEQ ID NO: 5763 - DNA, 23 bp, Artificial Sequence
  HLA-A targeting gRNA
cttcgtctcagtgggctacgtgg

SEQ ID NO: 5764 - DNA, 23 bp, Artificial Sequence
  HLA-A targeting gRNA
cttctctctaggacaattaaggg

SEQ ID NO: 5765 - DNA, 23 bp, Artificial Sequence
  HLA-A targeting gRNA
cttctcttgggtccaagactagg

SEQ ID NO: 5766 - DNA, 23 bp, Artificial Sequence
  HLA-A targeting gRNA
cttcttctcccaacctatgtcgg

SEQ ID NO: 5767 - DNA, 23 bp, Artificial Sequence
  HLA-A targeting gRNA
cttcttctcccaacctgcgacgg

SEQ ID NO: 5768 - DNA, 23 bp, Artificial Sequence
  HLA-A targeting gRNA
cttcttctcccaacctgcgtcgg

SEQ ID NO: 5769 - DNA, 23 bp, Artificial Sequence
  HLA-A targeting gRNA
cttcttctcccaacctgtgtcgg

SEQ ID NO: 5770 - DNA, 23 bp, Artificial Sequence
  HLA-A targeting gRNA
cttcttctcccaacttgtgtcgg

SEQ ID NO: 5771 - DNA, 23 bp, Artificial Sequence
  HLA-A targeting gRNA
cttcttcttccaacctgcgtcgg

SEQ ID NO: 5772 - DNA, 23 bp, Artificial Sequence
  HLA-A targeting gRNA
cttgaaaaggtgagattcttggg

SEQ ID NO: 5773 - DNA, 23 bp, Artificial Sequence
  HLA-A targeting gRNA
cttgctctatccacggcgcccgg

SEQ ID NO: 5774 - DNA, 23 bp, Artificial Sequence
  HLA-A targeting gRNA
cttgctctatccatggcgcccgg

SEQ ID NO: 5775 - DNA, 23 bp, Artificial Sequence
  HLA-A targeting gRNA
cttggggtctagagtgggcaggg

SEQ ID NO: 5776 - DNA, 23 bp, Artificial Sequence
  HLA-A targeting gRNA
cttggggtctagagtgggcgggg

SEQ ID NO: 5777 - DNA, 23 bp, Artificial Sequence
  HLA-A targeting gRNA
cttggggtctagagtgggtgggg

SEQ ID NO: 5778 - DNA, 23 bp, Artificial Sequence
  HLA-A targeting gRNA
cttggggtggatctcagacgggg

SEQ ID NO: 5779 - DNA, 23 bp, Artificial Sequence
  HLA-A targeting gRNA
cttgtaaaggtgagattctgggg

SEQ ID NO: 5780 - DNA, 23 bp, Artificial Sequence
  HLA-A targeting gRNA
cttgtgagggaccgagatgcagg

SEQ ID NO: 5781 - DNA, 23 bp, Artificial Sequence
  HLA-A targeting gRNA
cttgtgagggactgagatgcagg

SEQ ID NO: 5782 - DNA, 23 bp, Artificial Sequence
  HLA-A targeting gRNA
cttgtggagaccagaccagcagg

SEQ ID NO: 5783 - DNA, 23 bp, Artificial Sequence
  HLA-A targeting gRNA
cttgtggagaccagaccggcagg

SEQ ID NO: 5784 - DNA, 23 bp, Artificial Sequence
  HLA-A targeting gRNA
cttgtggagaccagacctgcagg

SEQ ID NO: 5785 - DNA, 23 bp, Artificial Sequence
  HLA-A targeting gRNA
cttgtggagaccaggccagcagg

SEQ ID NO: 5786 - DNA, 23 bp, Artificial Sequence
  HLA-A targeting gRNA
cttgtggagaccaggcgagcagg

SEQ ID NO: 5787 - DNA, 23 bp, Artificial Sequence
  HLA-A targeting gRNA
cttgtgtcgggtccttcttccgg

SEQ ID NO: 5788 - DNA, 23 bp, Artificial Sequence
  HLA-A targeting gRNA
ctttaaacacattgagcgtgagg

SEQ ID NO: 5789 - DNA, 23 bp, Artificial Sequence
  HLA-A targeting gRNA
ctttgccgtcgtaggcgtactgg

SEQ ID NO: 5790 - DNA, 23 bp, Artificial Sequence
  HLA-A targeting gRNA
ctttgccgtcgtaggcgtcctgg

SEQ ID NO: 5791 - DNA, 23 bp, Artificial Sequence
  HLA-A targeting gRNA
cttttgggtccaagacgaggagg

SEQ ID NO: 5792 - DNA, 23 bp, Artificial Sequence
  HLA-A targeting gRNA
cttttgggtccaagactaggagg

SEQ ID NO: 5793 - DNA, 23 bp, Artificial Sequence
  HLA-A targeting gRNA
cttttggttccaagacgaggagg

SEQ ID NO: 5794 - DNA, 23 bp, Artificial Sequence
  HLA-A targeting gRNA
ctttttttttgttctaccccagg

SEQ ID NO: 5795 - DNA, 23 bp, Artificial Sequence
  HLA-A targeting gRNA
gaaaccgggtaaacgcgcctggg

SEQ ID NO: 5796 - DNA, 23 bp, Artificial Sequence
  HLA-A targeting gRNA
gaaaccgggtaaaggcgactagg

SEQ ID NO: 5797 - DNA, 23 bp, Artificial Sequence
  HLA-A targeting gRNA
gaaaccgggtaaaggcgactggg

SEQ ID NO: 5798 - DNA, 23 bp, Artificial Sequence
  HLA-A targeting gRNA
gaaaccgggtaaaggtgactggg

SEQ ID NO: 5799 - DNA, 23 bp, Artificial Sequence
  HLA-A targeting gRNA
gaaaccgggtaaagtcgcctggg

SEQ ID NO: 5800 - DNA, 23 bp, Artificial Sequence
  HLA-A targeting gRNA
gaaactcaggggagtgggagtgg

SEQ ID NO: 5801 - DNA, 23 bp, Artificial Sequence
  HLA-A targeting gRNA
gaaagcaggagcccttcagcagg

SEQ ID NO: 5802 - DNA, 23 bp, Artificial Sequence
  HLA-A targeting gRNA
gaaagttcgagtctctgagcggg

SEQ ID NO: 5803 - DNA, 23 bp, Artificial Sequence
  HLA-A targeting gRNA
gaaagttcgagtctctgagtggg

SEQ ID NO: 5804 - DNA, 23 bp, Artificial Sequence
  HLA-A targeting gRNA
gaaatacttcatggagtgggagg

SEQ ID NO: 5805 - DNA, 23 bp, Artificial Sequence
  HLA-A targeting gRNA
gaacaaattcaggtcagtcatgg

SEQ ID NO: 5806 - DNA, 23 bp, Artificial Sequence
  HLA-A targeting gRNA
gaacaaattctggtgagtcatgg

SEQ ID NO: 5807 - DNA, 23 bp, Artificial Sequence
  HLA-A targeting gRNA
gaacaaattctggttagtcatgg

SEQ ID NO: 5808 - DNA, 23 bp, Artificial Sequence
  HLA-A targeting gRNA
gaaccatgacttttcctctcagg

SEQ ID NO: 5809 - DNA, 23 bp, Artificial Sequence
  HLA-A targeting gRNA
gaaccatgacttttcttctcagg

SEQ ID NO: 5810 - DNA, 23 bp, Artificial Sequence
  HLA-A targeting gRNA
gaaccctcctcctgctgctctgg

SEQ ID NO: 5811 - DNA, 23 bp, Artificial Sequence
  HLA-A targeting gRNA
gaaccgtcctcctgctgctctgg

SEQ ID NO: 5812 - DNA, 23 bp, Artificial Sequence
  HLA-A targeting gRNA
gaaccgtgacctttcctctcagg

SEQ ID NO: 5813 - DNA, 23 bp, Artificial Sequence
  HLA-A targeting gRNA
gaaccgtgacttttcctctcagg

SEQ ID NO: 5814 - DNA, 23 bp, Artificial Sequence
  HLA-A targeting gRNA
gaactacaagcgccaggcacagg

SEQ ID NO: 5815 - DNA, 23 bp, Artificial Sequence
  HLA-A targeting gRNA
gaactacgactgcagacccaggg

SEQ ID NO: 5816 - DNA, 23 bp, Artificial Sequence
  HLA-A targeting gRNA
gaactatgactgcagacccaggg

SEQ ID NO: 5817 - DNA, 23 bp, Artificial Sequence
  HLA-A targeting gRNA
gaagaaatacttcatggagtggg

SEQ ID NO: 5818 - DNA, 23 bp, Artificial Sequence
  HLA-A targeting gRNA
gaagaagaagtgaaactcagggg

SEQ ID NO: 5819 - DNA, 23 bp, Artificial Sequence
  HLA-A targeting gRNA
gaagaagacgctgcagcgcgcgg

SEQ ID NO: 5820 - DNA, 23 bp, Artificial Sequence
  HLA-A targeting gRNA
gaagaaggaccccacaagttggg

SEQ ID NO: 5821 - DNA, 23 bp, Artificial Sequence
  HLA-A targeting gRNA
gaagacggctctgggaaaggagg

SEQ ID NO: 5822 - DNA, 23 bp, Artificial Sequence
  HLA-A targeting gRNA
gaagagctcaggtagggaagggg

SEQ ID NO: 5823 - DNA, 23 bp, Artificial Sequence
  HLA-A targeting gRNA
gaagagttcaggtagggaagggg

SEQ ID NO: 5824 - DNA, 23 bp, Artificial Sequence
  HLA-A targeting gRNA
gaagagttctggtagggaagggg

SEQ ID NO: 5825 - DNA, 23 bp, Artificial Sequence
  HLA-A targeting gRNA
gaagatggccctgggaaaggagg

SEQ ID NO: 5826 - DNA, 23 bp, Artificial Sequence
  HLA-A targeting gRNA
gaagatggctctgggaaaggagg

SEQ ID NO: 5827 - DNA, 23 bp, Artificial Sequence
  HLA-A targeting gRNA
gaagcacaagcgccaggcacagg

SEQ ID NO: 5828 - DNA, 23 bp, Artificial Sequence
  HLA-A targeting gRNA
gaagccaatcagcgtcgccgcgg

SEQ ID NO: 5829 - DNA, 23 bp, Artificial Sequence
  HLA-A targeting gRNA
gaagccaatcagcgtcgccgggg

SEQ ID NO: 5830 - DNA, 23 bp, Artificial Sequence
  HLA-A targeting gRNA
gaagccaatcagcgtcgccgtgg

SEQ ID NO: 5831 - DNA, 23 bp, Artificial Sequence
  HLA-A targeting gRNA
gaagccaatcagcgttgccgcgg

SEQ ID NO: 5832 - DNA, 23 bp, Artificial Sequence
  HLA-A targeting gRNA
gaagccaatcagtgtcgccgggg

SEQ ID NO: 5833 - DNA, 23 bp, Artificial Sequence
  HLA-A targeting gRNA
gaagcccctcaccctgagatggg

SEQ ID NO: 5834 - DNA, 23 bp, Artificial Sequence
  HLA-A targeting gRNA
gaagcccctcatgctgtacatgg

SEQ ID NO: 5835 - DNA, 23 bp, Artificial Sequence
  HLA-A targeting gRNA
gaagcggagctccccgcggccgg

SEQ ID NO: 5836 - DNA, 23 bp, Artificial Sequence
  HLA-A targeting gRNA
gaagcgggactctccgcggccgg

SEQ ID NO: 5837 - DNA, 23 bp, Artificial Sequence
  HLA-A targeting gRNA
gaagcggggctccccacggccgg

SEQ ID NO: 5838 - DNA, 23 bp, Artificial Sequence
  HLA-A targeting gRNA
gaagcggggctccccgcagccgg

SEQ ID NO: 5839 - DNA, 23 bp, Artificial Sequence
  HLA-A targeting gRNA
gaagcggggctccccgctgccgg

SEQ ID NO: 5840 - DNA, 23 bp, Artificial Sequence
  HLA-A targeting gRNA
gaagcggggctctccgcggccgg

SEQ ID NO: 5841 - DNA, 23 bp, Artificial Sequence
  HLA-A targeting gRNA
gaaggaaacgctgcagcgcgcgg

SEQ ID NO: 5842 - DNA, 23 bp, Artificial Sequence
  HLA-A targeting gRNA
gaaggacacgctggagcgcgcgg

SEQ ID NO: 5843 - DNA, 23 bp, Artificial Sequence
  HLA-A targeting gRNA
gaaggacggatgtatcaccgtgg

SEQ ID NO: 5844 - DNA, 23 bp, Artificial Sequence
  HLA-A targeting gRNA
gaaggacggatgtatcaccttgg

SEQ ID NO: 5845 - DNA, 23 bp, Artificial Sequence
  HLA-A targeting gRNA
gaaggagaccctgcagcgcgcgg

SEQ ID NO: 5846 - DNA, 23 bp, Artificial Sequence
  HLA-A targeting gRNA
gaaggagacgctgcaacgcgcgg

SEQ ID NO: 5847 - DNA, 23 bp, Artificial Sequence
  HLA-A targeting gRNA
gaaggagacgctgcagagcgcgg

SEQ ID NO: 5848 - DNA, 23 bp, Artificial Sequence
  HLA-A targeting gRNA
gaaggagacgctgcagcacgcgg

SEQ ID NO: 5849 - DNA, 23 bp, Artificial Sequence
  HLA-A targeting gRNA
gaaggagacgctggagcgcgcgg

SEQ ID NO: 5850 - DNA, 23 bp, Artificial Sequence
  HLA-A targeting gRNA
gaaggaggggccggagtattggg

SEQ ID NO: 5851 - DNA, 23 bp, Artificial Sequence
  HLA-A targeting gRNA
gaagtacaagcgccaggcacagg

SEQ ID NO: 5852 - DNA, 23 bp, Artificial Sequence
  HLA-A targeting gRNA
gaagtatgactacagacccaagg

SEQ ID NO: 5853 - DNA, 23 bp, Artificial Sequence
  HLA-A targeting gRNA
gaagtatgactacagacccaggg

SEQ ID NO: 5854 - DNA, 23 bp, Artificial Sequence
  HLA-A targeting gRNA
gaagtcccaggccccgggcgggg

SEQ ID NO: 5855 - DNA, 23 bp, Artificial Sequence
  HLA-A targeting gRNA
gaagtcccaggtcccggacgggg

SEQ ID NO: 5856 - DNA, 23 bp, Artificial Sequence
  HLA-A targeting gRNA
gaagtcccaggtcccgggcgggg

SEQ ID NO: 5857 - DNA, 23 bp, Artificial Sequence
  HLA-A targeting gRNA
gaagtcccatgtcccggacgggg

SEQ ID NO: 5858 - DNA, 23 bp, Artificial Sequence
  HLA-A targeting gRNA
gaagtccccagtcacccacccgg

SEQ ID NO: 5859 - DNA, 23 bp, Artificial Sequence
  HLA-A targeting gRNA
gaagtccctgaggaaatggaggg

SEQ ID NO: 5860 - DNA, 23 bp, Artificial Sequence
  HLA-A targeting gRNA
gaagtccttgaggaaatggaggg

SEQ ID NO: 5861 - DNA, 23 bp, Artificial Sequence
  HLA-A targeting gRNA
gaagtctctgaggaaatggaggg

SEQ ID NO: 5862 - DNA, 23 bp, Artificial Sequence
  HLA-A targeting gRNA
gaagtgaaactcagggaagtggg

SEQ ID NO: 5863 - DNA, 23 bp, Artificial Sequence
  HLA-A targeting gRNA
gaagtgaaactcaggggagtggg

SEQ ID NO: 5864 - DNA, 23 bp, Artificial Sequence
  HLA-A targeting gRNA
gaagtgaaactcgtgggagtggg

SEQ ID NO: 5865 - DNA, 23 bp, Artificial Sequence
  HLA-A targeting gRNA
gaagtgaaactcttgggagtggg

SEQ ID NO: 5866 - DNA, 23 bp, Artificial Sequence
  HLA-A targeting gRNA
gaagtgggagcctgggggcgagg

SEQ ID NO: 5867 - DNA, 23 bp, Artificial Sequence
  HLA-A targeting gRNA
gaagtggggctccccgcggccgg

SEQ ID NO: 5868 - DNA, 23 bp, Artificial Sequence
  HLA-A targeting gRNA
gaagtggggctctccgcggccgg

SEQ ID NO: 5869 - DNA, 23 bp, Artificial Sequence
  HLA-A targeting gRNA
gaagtggggctctccgcggctgg

SEQ ID NO: 5870 - DNA, 23 bp, Artificial Sequence
  HLA-A targeting gRNA
gaatatcgccctcccttgaatgg

SEQ ID NO: 5871 - DNA, 23 bp, Artificial Sequence
  HLA-A targeting gRNA
gaatatgtatggctgcgacgtgg

SEQ ID NO: 5872 - DNA, 23 bp, Artificial Sequence
  HLA-A targeting gRNA
gaatgacgtctctgaggaaatgg

SEQ ID NO: 5873 - DNA, 23 bp, Artificial Sequence
  HLA-A targeting gRNA
gaatgtcgccctcccttgaatgg

SEQ ID NO: 5874 - DNA, 23 bp, Artificial Sequence
  HLA-A targeting gRNA
gaatgtcgccctccgttgaatgg

SEQ ID NO: 5875 - DNA, 23 bp, Artificial Sequence
  HLA-A targeting gRNA
gacaagaggaattatggagtagg

SEQ ID NO: 5876 - DNA, 23 bp, Artificial Sequence
  HLA-A targeting gRNA
gacaagaggaattatggggcggg

SEQ ID NO: 5877 - DNA, 23 bp, Artificial Sequence
  HLA-A targeting gRNA
gacaagaggaattatggggtagg

SEQ ID NO: 5878 - DNA, 23 bp, Artificial Sequence
  HLA-A targeting gRNA
gacaagaggaattatggggtggg

SEQ ID NO: 5879 - DNA, 23 bp, Artificial Sequence
  HLA-A targeting gRNA
gacacaaaagtacaagcgccagg

SEQ ID NO: 5880 - DNA, 23 bp, Artificial Sequence
  HLA-A targeting gRNA
gacacagaactacaagcgccagg

SEQ ID NO: 5881 - DNA, 23 bp, Artificial Sequence
  HLA-A targeting gRNA
gacacagaagaacaagcgccagg

SEQ ID NO: 5882 - DNA, 23 bp, Artificial Sequence
  HLA-A targeting gRNA
gacacagaagcacaagcgccagg

SEQ ID NO: 5883 - DNA, 23 bp, Artificial Sequence
  HLA-A targeting gRNA
gacacagaagtacaagcgccagg

SEQ ID NO: 5884 - DNA, 23 bp, Artificial Sequence
  HLA-A targeting gRNA
gacacagatctgcaaggccaagg

SEQ ID NO: 5885 - DNA, 23 bp, Artificial Sequence
  HLA-A targeting gRNA
gacacagatctgcaaggcccagg

SEQ ID NO: 5886 - DNA, 23 bp, Artificial Sequence
  HLA-A targeting gRNA
gacaccgccacgtcccggcccgg

SEQ ID NO: 5887 - DNA, 23 bp, Artificial Sequence
  HLA-A targeting gRNA
gacaccgccatgtcccggcccgg

SEQ ID NO: 5888 - DNA, 23 bp, Artificial Sequence
  HLA-A targeting gRNA
gacaccgccgtgtcccggcccgg

SEQ ID NO: 5889 - DNA, 23 bp, Artificial Sequence
  HLA-A targeting gRNA
gacaccgccgtgtcctggcccgg

SEQ ID NO: 5890 - DNA, 23 bp, Artificial Sequence
  HLA-A targeting gRNA
gacacctgatcagtattctaggg

SEQ ID NO: 5891 - DNA, 23 bp, Artificial Sequence
  HLA-A targeting gRNA
gacacctggggtagggaaggggg

SEQ ID NO: 5892 - DNA, 23 bp, Artificial Sequence
  HLA-A targeting gRNA
gacacctggggtggggaaggcgg

SEQ ID NO: 5893 - DNA, 23 bp, Artificial Sequence
  HLA-A targeting gRNA
gacacctggggtggggaaggggg

SEQ ID NO: 5894 - DNA, 23 bp, Artificial Sequence
  HLA-A targeting gRNA
gacaggaggaattagggggtggg

SEQ ID NO: 5895 - DNA, 23 bp, Artificial Sequence
  HLA-A targeting gRNA
gacaggaggaattatggggtggg

SEQ ID NO: 5896 - DNA, 23 bp, Artificial Sequence
  HLA-A targeting gRNA
gacatctctgaggaaatggaggg

SEQ ID NO: 5897 - DNA, 23 bp, Artificial Sequence
  HLA-A targeting gRNA
gaccacagcgaccacagctacgg

SEQ ID NO: 5898 - DNA, 23 bp, Artificial Sequence
  HLA-A targeting gRNA
gaccagcatctcggcgtctgagg

SEQ ID NO: 5899 - DNA, 23 bp, Artificial Sequence
  HLA-A targeting gRNA
gaccagcatcttggcgtctgagg

SEQ ID NO: 5900 - DNA, 23 bp, Artificial Sequence
  HLA-A targeting gRNA
gacccaggacaccgagcttgtgg

SEQ ID NO: 5901 - DNA, 23 bp, Artificial Sequence
  HLA-A targeting gRNA
gaccccgcactcaccagcccagg

SEQ ID NO: 5902 - DNA, 23 bp, Artificial Sequence
  HLA-A targeting gRNA
gaccccgcactcaccggcccagg

SEQ ID NO: 5903 - DNA, 23 bp, Artificial Sequence
  HLA-A targeting gRNA
gacccctgatcactatcctaggg

SEQ ID NO: 5904 - DNA, 23 bp, Artificial Sequence
  HLA-A targeting gRNA
gacccctgatcagtattataggg

SEQ ID NO: 5905 - DNA, 23 bp, Artificial Sequence
  HLA-A targeting gRNA
gacccctgatcagtattccaggg

SEQ ID NO: 5906 - DNA, 23 bp, Artificial Sequence
  HLA-A targeting gRNA
gacccctgatcagtattctaggg

SEQ ID NO: 5907 - DNA, 23 bp, Artificial Sequence
  HLA-A targeting gRNA
gacccgcatctcggcctctgggg

SEQ ID NO: 5908 - DNA, 23 bp, Artificial Sequence
  HLA-A targeting gRNA
gacccgcatctcggcgtctgagg

SEQ ID NO: 5909 - DNA, 23 bp, Artificial Sequence
  HLA-A targeting gRNA
gacccgcatctcggcgtctgggg

SEQ ID NO: 5910 - DNA, 23 bp, Artificial Sequence
  HLA-A targeting gRNA
gacccgcatctcggtgtctgagg

SEQ ID NO: 5911 - DNA, 23 bp, Artificial Sequence
  HLA-A targeting gRNA
gacccgccagaccctcctcccgg

SEQ ID NO: 5912 - DNA, 23 bp, Artificial Sequence
  HLA-A targeting gRNA
gacccgcccaaaccctcgaccgg

SEQ ID NO: 5913 - DNA, 23 bp, Artificial Sequence
  HLA-A targeting gRNA
gacccgcccagaccctcgaccgg

SEQ ID NO: 5914 - DNA, 23 bp, Artificial Sequence
  HLA-A targeting gRNA
gacccgcccgacccacctcccgg

SEQ ID NO: 5915 - DNA, 23 bp, Artificial Sequence
  HLA-A targeting gRNA
gacccgcccgaccctcctaccgg

SEQ ID NO: 5916 - DNA, 23 bp, Artificial Sequence
  HLA-A targeting gRNA
gaccctgagagccccgcccgggg

SEQ ID NO: 5917 - DNA, 23 bp, Artificial Sequence
  HLA-A targeting gRNA
gaccgggctgaccacgggggcgg

SEQ ID NO: 5918 - DNA, 23 bp, Artificial Sequence
  HLA-A targeting gRNA
gaccgtgagtgaccccggcccgg

SEQ ID NO: 5919 - DNA, 23 bp, Artificial Sequence
  HLA-A targeting gRNA
gacctgcgctcctggaccgccgg

SEQ ID NO: 5920 - DNA, 23 bp, Artificial Sequence
  HLA-A targeting gRNA
gacctggaccggtgagtgcgggg

SEQ ID NO: 5921 - DNA, 23 bp, Artificial Sequence
  HLA-A targeting gRNA
gacctggcagcgggatggcaagg

SEQ ID NO: 5922 - DNA, 23 bp, Artificial Sequence
  HLA-A targeting gRNA
gacctggcagcgggatggcgagg

SEQ ID NO: 5923 - DNA, 23 bp, Artificial Sequence
  HLA-A targeting gRNA
gacctggcagtgggatggggagg

SEQ ID NO: 5924 - DNA, 23 bp, Artificial Sequence
  HLA-A targeting gRNA
gacctgggccggtgagtgcgggg

SEQ ID NO: 5925 - DNA, 23 bp, Artificial Sequence
  HLA-A targeting gRNA
gacctgggcctgtgagtgcgagg

SEQ ID NO: 5926 - DNA, 23 bp, Artificial Sequence
  HLA-A targeting gRNA
gacctgggcctgtgagtgcgggg

SEQ ID NO: 5927 - DNA, 23 bp, Artificial Sequence
  HLA-A targeting gRNA
gacctgggctggtgagtgcgggg

SEQ ID NO: 5928 - DNA, 23 bp, Artificial Sequence
  HLA-A targeting gRNA
gacctggtagcgggatggcgagg

SEQ ID NO: 5929 - DNA, 23 bp, Artificial Sequence
  HLA-A targeting gRNA
gacgatgtacggctgcgacgtgg

SEQ ID NO: 5930 - DNA, 23 bp, Artificial Sequence
  HLA-A targeting gRNA
gacgatgtatggctgcgacatgg

SEQ ID NO: 5931 - DNA, 23 bp, Artificial Sequence
  HLA-A targeting gRNA
gacgatgtatggctgcgacctgg

SEQ ID NO: 5932 - DNA, 23 bp, Artificial Sequence
  HLA-A targeting gRNA
gacgatgtatggctgcgacgtgg

SEQ ID NO: 5933 - DNA, 23 bp, Artificial Sequence
  HLA-A targeting gRNA
gacgcagaagtacaagcgccagg

SEQ ID NO: 5934 - DNA, 23 bp, Artificial Sequence
  HLA-A targeting gRNA
gacgccgcgagtccgagaagggg

SEQ ID NO: 5935 - DNA, 23 bp, Artificial Sequence
  HLA-A targeting gRNA
gacggagccccgggcgccgtggg

SEQ ID NO: 5936 - DNA, 23 bp, Artificial Sequence
  HLA-A targeting gRNA
gacgggctgaccacgggggcggg

SEQ ID NO: 5937 - DNA, 23 bp, Artificial Sequence
  HLA-A targeting gRNA
gacggggctctcagggtctcagg

SEQ ID NO: 5938 - DNA, 23 bp, Artificial Sequence
  HLA-A targeting gRNA
gacggggctctcagtgtctcagg

SEQ ID NO: 5939 - DNA, 23 bp, Artificial Sequence
  HLA-A targeting gRNA
gacggggctgaccacgggggcgg

SEQ ID NO: 5940 - DNA, 23 bp, Artificial Sequence
  HLA-A targeting gRNA
gacggggctgaccgcggggccgg

SEQ ID NO: 5941 - DNA, 23 bp, Artificial Sequence
  HLA-A targeting gRNA
gacggggctgaccgcgggggcgg

SEQ ID NO: 5942 - DNA, 23 bp, Artificial Sequence
  HLA-A targeting gRNA
gacggggctggccgcggggccgg

SEQ ID NO: 5943 - DNA, 23 bp, Artificial Sequence
  HLA-A targeting gRNA
gacggtgagtgaccccggcctgg

SEQ ID NO: 5944 - DNA, 23 bp, Artificial Sequence
  HLA-A targeting gRNA
gacggtgctgaccgcggggccgg

SEQ ID NO: 5945 - DNA, 23 bp, Artificial Sequence
  HLA-A targeting gRNA
gacgtctctgaggaaatggaggg

SEQ ID NO: 5946 - DNA, 23 bp, Artificial Sequence
  HLA-A targeting gRNA
gacgtctctgaggaaatgtaggg

SEQ ID NO: 5947 - DNA, 23 bp, Artificial Sequence
  HLA-A targeting gRNA
gacgtgggacaggaggaattagg

SEQ ID NO: 5948 - DNA, 23 bp, Artificial Sequence
  HLA-A targeting gRNA
gactcacgaatgctggaatcagg

SEQ ID NO: 5949 - DNA, 23 bp, Artificial Sequence
  HLA-A targeting gRNA
gactcatgaatgctgaaatcagg

SEQ ID NO: 5950 - DNA, 23 bp, Artificial Sequence
  HLA-A targeting gRNA
gactcatgaatgctggaatcagg

SEQ ID NO: 5951 - DNA, 23 bp, Artificial Sequence
  HLA-A targeting gRNA
gactccccatcccccacggacgg

SEQ ID NO: 5952 - DNA, 23 bp, Artificial Sequence
  HLA-A targeting gRNA
gactccccatcccccacgtacgg

SEQ ID NO: 5953 - DNA, 23 bp, Artificial Sequence
  HLA-A targeting gRNA
gactgggctgaccacgggggcgg

SEQ ID NO: 5954 - DNA, 23 bp, Artificial Sequence
  HLA-A targeting gRNA
gactgggctgaccgcggggccgg

SEQ ID NO: 5955 - DNA, 23 bp, Artificial Sequence
  HLA-A targeting gRNA
gactgggctgaccgcgggggcgg

SEQ ID NO: 5956 - DNA, 23 bp, Artificial Sequence
  HLA-A targeting gRNA
gagaacaaggcctgagagaaagg

SEQ ID NO: 5957 - DNA, 23 bp, Artificial Sequence
  HLA-A targeting gRNA
gagaaccccgcccgggacctggg

SEQ ID NO: 5958 - DNA, 23 bp, Artificial Sequence
  HLA-A targeting gRNA
gagaacctgcggaacctgcgcgg

SEQ ID NO: 5959 - DNA, 23 bp, Artificial Sequence
  HLA-A targeting gRNA
gagaacggacaggacacctgggg

SEQ ID NO: 5960 - DNA, 23 bp, Artificial Sequence
  HLA-A targeting gRNA
gagaagccaatcagcgtcgccgg

SEQ ID NO: 5961 - DNA, 23 bp, Artificial Sequence
  HLA-A targeting gRNA
gagaagccaatcagtgtcgccgg

SEQ ID NO: 5962 - DNA, 23 bp, Artificial Sequence
  HLA-A targeting gRNA
gagaatggacaggacacctgggg

SEQ ID NO: 5963 - DNA, 23 bp, Artificial Sequence
  HLA-A targeting gRNA
gagaatggacgggacacctgggg

SEQ ID NO: 5964 - DNA, 23 bp, Artificial Sequence
  HLA-A targeting gRNA
gagaatgggcaggacacctgggg

SEQ ID NO: 5965 - DNA, 23 bp, Artificial Sequence
  HLA-A targeting gRNA
gagacactgagagccccgtccgg

SEQ ID NO: 5966 - DNA, 23 bp, Artificial Sequence
  HLA-A targeting gRNA
gagacagaaccttccagaagtgg

SEQ ID NO: 5967 - DNA, 23 bp, Artificial Sequence
  HLA-A targeting gRNA
gagaccaggccagcaggagatgg

SEQ ID NO: 5968 - DNA, 23 bp, Artificial Sequence
  HLA-A targeting gRNA
gagaccaggcgagcaggagatgg

SEQ ID NO: 5969 - DNA, 23 bp, Artificial Sequence
  HLA-A targeting gRNA
gagacccagagagccccgcccgg

SEQ ID NO: 5970 - DNA, 23 bp, Artificial Sequence
  HLA-A targeting gRNA
gagacccgggccgtacgtcgggg

SEQ ID NO: 5971 - DNA, 23 bp, Artificial Sequence
  HLA-A targeting gRNA
gagaccctgagaaccccgcccgg

SEQ ID NO: 5972 - DNA, 23 bp, Artificial Sequence
  HLA-A targeting gRNA
gagaccctgagagccccgcccgg

SEQ ID NO: 5973 - DNA, 23 bp, Artificial Sequence
  HLA-A targeting gRNA
gagaccctgagagccccgtccgg

SEQ ID NO: 5974 - DNA, 23 bp, Artificial Sequence
  HLA-A targeting gRNA
gagacctggaccggtgagtgcgg

SEQ ID NO: 5975 - DNA, 23 bp, Artificial Sequence
  HLA-A targeting gRNA
gagacctgggccggtgagtgcgg

SEQ ID NO: 5976 - DNA, 23 bp, Artificial Sequence
  HLA-A targeting gRNA
gagacctgggcctgtgagtgcgg

SEQ ID NO: 5977 - DNA, 23 bp, Artificial Sequence
  HLA-A targeting gRNA
gagacctgggcgggtgagtgcgg

SEQ ID NO: 5978 - DNA, 23 bp, Artificial Sequence
  HLA-A targeting gRNA
gagacctgggctggtgagtgcgg

SEQ ID NO: 5979 - DNA, 23 bp, Artificial Sequence
  HLA-A targeting gRNA
gagagactcatcagagccctggg

SEQ ID NO: 5980 - DNA, 23 bp, Artificial Sequence
  HLA-A targeting gRNA
gagagaggggaccgcaggcgggg

SEQ ID NO: 5981 - DNA, 23 bp, Artificial Sequence
  HLA-A targeting gRNA
gagagccccgcccgggacctggg

SEQ ID NO: 5982 - DNA, 23 bp, Artificial Sequence
  HLA-A targeting gRNA
gagagccccgcccggggcctggg

SEQ ID NO: 5983 - DNA, 23 bp, Artificial Sequence
  HLA-A targeting gRNA
gagagccccgtccgggacatggg

SEQ ID NO: 5984 - DNA, 23 bp, Artificial Sequence
  HLA-A targeting gRNA
gagagccccgtccgggacctggg

SEQ ID NO: 5985 - DNA, 23 bp, Artificial Sequence
  HLA-A targeting gRNA
gagagcctgcgaaacctgcgcgg

SEQ ID NO: 5986 - DNA, 23 bp, Artificial Sequence
  HLA-A targeting gRNA
gagagcctgcggaacctgcgcgg

SEQ ID NO: 5987 - DNA, 23 bp, Artificial Sequence
  HLA-A targeting gRNA
gagagcctgcggaccctgcgcgg

SEQ ID NO: 5988 - DNA, 23 bp, Artificial Sequence
  HLA-A targeting gRNA
gagagcctgcggatcctgcgcgg

SEQ ID NO: 5989 - DNA, 23 bp, Artificial Sequence
  HLA-A targeting gRNA
gagaggagccgcgggcgccgtgg

SEQ ID NO: 5990 - DNA, 23 bp, Artificial Sequence
  HLA-A targeting gRNA
gagaggagccgcgggcgcggtgg

SEQ ID NO: 5991 - DNA, 23 bp, Artificial Sequence
  HLA-A targeting gRNA
gagatagaaccttccagaagtgg

SEQ ID NO: 5992 - DNA, 23 bp, Artificial Sequence
  HLA-A targeting gRNA
gagatccgcccccgaggccgcgg

SEQ ID NO: 5993 - DNA, 23 bp, Artificial Sequence
  HLA-A targeting gRNA
gagatccgccccgaggccgcggg

SEQ ID NO: 5994 - DNA, 23 bp, Artificial Sequence
  HLA-A targeting gRNA
gagatggaaccttccagaagtgg

SEQ ID NO: 5995 - DNA, 23 bp, Artificial Sequence
  HLA-A targeting gRNA
gagattctggggagctgaagtgg

SEQ ID NO: 5996 - DNA, 23 bp, Artificial Sequence
  HLA-A targeting gRNA
gagattcttggggtctagagtgg

SEQ ID NO: 5997 - DNA, 23 bp, Artificial Sequence
  HLA-A targeting gRNA
gagcaaggggaccgcaggcgggg

SEQ ID NO: 5998 - DNA, 23 bp, Artificial Sequence
  HLA-A targeting gRNA
gagcaccgcttcatctcagtggg

SEQ ID NO: 5999 - DNA, 23 bp, Artificial Sequence
  HLA-A targeting gRNA
gagcagcaggaggacggttcggg

SEQ ID NO: 6000 - DNA, 23 bp, Artificial Sequence
  HLA-A targeting gRNA
gagcagcaggaggagagttcggg

SEQ ID NO: 6001 - DNA, 23 bp, Artificial Sequence
  HLA-A targeting gRNA
gagcagcaggaggagggctcggg

SEQ ID NO: 6002 - DNA, 23 bp, Artificial Sequence
  HLA-A targeting gRNA
gagcagcaggaggagggcttggg

SEQ ID NO: 6003 - DNA, 23 bp, Artificial Sequence
  HLA-A targeting gRNA
gagcagcaggaggagggttcggg

SEQ ID NO: 6004 - DNA, 23 bp, Artificial Sequence
  HLA-A targeting gRNA
gagcagcaggatgagggttcagg

SEQ ID NO: 6005 - DNA, 23 bp, Artificial Sequence
  HLA-A targeting gRNA
gagcagcaggatgagggttcggg

SEQ ID NO: 6006 - DNA, 23 bp, Artificial Sequence
  HLA-A targeting gRNA
gagcatgtacggctgcgacctgg

SEQ ID NO: 6007 - DNA, 23 bp, Artificial Sequence
  HLA-A targeting gRNA
gagcatgtacggctgcgacgtgg

SEQ ID NO: 6008 - DNA, 23 bp, Artificial Sequence
  HLA-A targeting gRNA
gagcatgtatggctgcgacgtgg

SEQ ID NO: 6009 - DNA, 23 bp, Artificial Sequence
  HLA-A targeting gRNA
gagccatggatagagcaggaggg

SEQ ID NO: 6010 - DNA, 23 bp, Artificial Sequence
  HLA-A targeting gRNA
gagccccaaacactgagtgtggg

SEQ ID NO: 6011 - DNA, 23 bp, Artificial Sequence
  HLA-A targeting gRNA
gagccccacttcatcgcagtggg

SEQ ID NO: 6012 - DNA, 23 bp, Artificial Sequence
  HLA-A targeting gRNA
gagccccaggcgactttacccgg

SEQ ID NO: 6013 - DNA, 23 bp, Artificial Sequence
  HLA-A targeting gRNA
gagccccaggcgcctttacccgg

SEQ ID NO: 6014 - DNA, 23 bp, Artificial Sequence
  HLA-A targeting gRNA
gagccccaggcgcgtttacccgg

SEQ ID NO: 6015 - DNA, 23 bp, Artificial Sequence
  HLA-A targeting gRNA
gagccccagtcacctttacccgg

SEQ ID NO: 6016 - DNA, 23 bp, Artificial Sequence
  HLA-A targeting gRNA
gagccccagtcgcctttacccgg

SEQ ID NO: 6017 - DNA, 23 bp, Artificial Sequence
  HLA-A targeting gRNA
gagccccgcttcatcaccgtggg

SEQ ID NO: 6018 - DNA, 23 bp, Artificial Sequence
  HLA-A targeting gRNA
gagccccgcttcatctcagtggg

SEQ ID NO: 6019 - DNA, 23 bp, Artificial Sequence
  HLA-A targeting gRNA
gagccccgcttcattaccgtggg

SEQ ID NO: 6020 - DNA, 23 bp, Artificial Sequence
  HLA-A targeting gRNA
gagccccgcttcattgcagtggg

SEQ ID NO: 6021 - DNA, 23 bp, Artificial Sequence
  HLA-A targeting gRNA
gagccccgcttcgtctcagtggg

SEQ ID NO: 6022 - DNA, 23 bp, Artificial Sequence
  HLA-A targeting gRNA
gagcccctcaccctgagctgggg

SEQ ID NO: 6023 - DNA, 23 bp, Artificial Sequence
  HLA-A targeting gRNA
gagccctagtcgcctttacccgg

SEQ ID NO: 6024 - DNA, 23 bp, Artificial Sequence
  HLA-A targeting gRNA
gagccgcctcccacttgcgctgg

SEQ ID NO: 6025 - DNA, 23 bp, Artificial Sequence
  HLA-A targeting gRNA
gagccgtggatggagcaggaggg

SEQ ID NO: 6026 - DNA, 23 bp, Artificial Sequence
  HLA-A targeting gRNA
gagccgtgggtggagcaggaggg

SEQ ID NO: 6027 - DNA, 23 bp, Artificial Sequence
  HLA-A targeting gRNA
gagccttccccatctcctatagg

SEQ ID NO: 6028 - DNA, 23 bp, Artificial Sequence
  HLA-A targeting gRNA
gagccttgtctgcattggggagg

SEQ ID NO: 6029 - DNA, 23 bp, Artificial Sequence
  HLA-A targeting gRNA
gagcgaggggaccgcaggcgggg

SEQ ID NO: 6030 - DNA, 23 bp, Artificial Sequence
  HLA-A targeting gRNA
gagctcaggtagggaaggggtgg

SEQ ID NO: 6031 - DNA, 23 bp, Artificial Sequence
  HLA-A targeting gRNA
gagctccccgcggccgggccagg

SEQ ID NO: 6032 - DNA, 23 bp, Artificial Sequence
  HLA-A targeting gRNA
gagctccgcttcatcgcagtggg

SEQ ID NO: 6033 - DNA, 23 bp, Artificial Sequence
  HLA-A targeting gRNA
gagctcctccacacgcccaccgg

SEQ ID NO: 6034 - DNA, 23 bp, Artificial Sequence
  HLA-A targeting gRNA
gagctgaagtggtcgggggtggg

SEQ ID NO: 6035 - DNA, 23 bp, Artificial Sequence
  HLA-A targeting gRNA
gagctgaagtggtctggggtggg

SEQ ID NO: 6036 - DNA, 23 bp, Artificial Sequence
  HLA-A targeting gRNA
gagctgggtgatctgagccgcgg

SEQ ID NO: 6037 - DNA, 23 bp, Artificial Sequence
  HLA-A targeting gRNA
gagcttgtacggctgcgacgtgg

SEQ ID NO: 6038 - DNA, 23 bp, Artificial Sequence
  HLA-A targeting gRNA
gaggaaaatgggatcagcactgg

SEQ ID NO: 6039 - DNA, 23 bp, Artificial Sequence
  HLA-A targeting gRNA
gaggaaaatgggatcagcgctgg

SEQ ID NO: 6040 - DNA, 23 bp, Artificial Sequence
  HLA-A targeting gRNA
gaggaaagtcacggttcccaagg

SEQ ID NO: 6041 - DNA, 23 bp, Artificial Sequence
  HLA-A targeting gRNA
gaggacctgcggaacctgcgcgg

SEQ ID NO: 6042 - DNA, 23 bp, Artificial Sequence
  HLA-A targeting gRNA
gaggacctgcggaccctgcgcgg

SEQ ID NO: 6043 - DNA, 23 bp, Artificial Sequence
  HLA-A targeting gRNA
gaggagactctgagtccgggtgg

SEQ ID NO: 6044 - DNA, 23 bp, Artificial Sequence
  HLA-A targeting gRNA
gaggagattctgagtccgggtgg

SEQ ID NO: 6045 - DNA, 23 bp, Artificial Sequence
  HLA-A targeting gRNA
gaggagattttgagtccgggtgg

SEQ ID NO: 6046 - DNA, 23 bp, Artificial Sequence
  HLA-A targeting gRNA
gaggagccgcgccgggaggaggg

SEQ ID NO: 6047 - DNA, 23 bp, Artificial Sequence
  HLA-A targeting gRNA
gaggatgtaaggctgcgacgtgg

SEQ ID NO: 6048 - DNA, 23 bp, Artificial Sequence
  HLA-A targeting gRNA
gaggatgtacggctgcgacctgg

SEQ ID NO: 6049 - DNA, 23 bp, Artificial Sequence
  HLA-A targeting gRNA
gaggatgtacggctgcgacgtgg

SEQ ID NO: 6050 - DNA, 23 bp, Artificial Sequence
  HLA-A targeting gRNA
gaggatgtacggctgggacctgg

SEQ ID NO: 6051 - DNA, 23 bp, Artificial Sequence
  HLA-A targeting gRNA
gaggatgtatggctgcgacctgg

SEQ ID NO: 6052 - DNA, 23 bp, Artificial Sequence
  HLA-A targeting gRNA
gaggatgtctggctgcgacccgg

SEQ ID NO: 6053 - DNA, 23 bp, Artificial Sequence
  HLA-A targeting gRNA
gaggatgtctggctgcgacctgg

SEQ ID NO: 6054 - DNA, 23 bp, Artificial Sequence
  HLA-A targeting gRNA
gaggatgtctggctgcgacgtgg

SEQ ID NO: 6055 - DNA, 23 bp, Artificial Sequence
  HLA-A targeting gRNA
gaggatgtttggctgcgacctgg

SEQ ID NO: 6056 - DNA, 23 bp, Artificial Sequence
  HLA-A targeting gRNA
gaggcccttgaagtcacaaaggg

SEQ ID NO: 6057 - DNA, 23 bp, Artificial Sequence
  HLA-A targeting gRNA
gaggctcttgaagtcacaaaggg

SEQ ID NO: 6058 - DNA, 23 bp, Artificial Sequence
  HLA-A targeting gRNA
gagggaaaaggcctaggtaatgg

SEQ ID NO: 6059 - DNA, 23 bp, Artificial Sequence
  HLA-A targeting gRNA
gagggaaaaggcctgggtaatgg

SEQ ID NO: 6060 - DNA, 23 bp, Artificial Sequence
  HLA-A targeting gRNA
gagggagcctgggggcgaggagg

SEQ ID NO: 6061 - DNA, 23 bp, Artificial Sequence
  HLA-A targeting gRNA
gagggaggaacagcgacttctgg

SEQ ID NO: 6062 - DNA, 23 bp, Artificial Sequence
  HLA-A targeting gRNA
gagggcaccgcagatacctgtgg

SEQ ID NO: 6063 - DNA, 23 bp, Artificial Sequence
  HLA-A targeting gRNA
gagggcactgggaggaagcaggg

SEQ ID NO: 6064 - DNA, 23 bp, Artificial Sequence
  HLA-A targeting gRNA
gagggccccctctgctctctagg

SEQ ID NO: 6065 - DNA, 23 bp, Artificial Sequence
  HLA-A targeting gRNA
gagggccccctctgctgtctagg

SEQ ID NO: 6066 - DNA, 23 bp, Artificial Sequence
  HLA-A targeting gRNA
gagggccccctcttctctctagg

SEQ ID NO: 6067 - DNA, 23 bp, Artificial Sequence
  HLA-A targeting gRNA
gagggccccgtctgctctctagg

SEQ ID NO: 6068 - DNA, 23 bp, Artificial Sequence
  HLA-A targeting gRNA
gaggggaaaggcctgggtaatgg

SEQ ID NO: 6069 - DNA, 23 bp, Artificial Sequence
  HLA-A targeting gRNA
gaggggacagggaggaggcaggg

SEQ ID NO: 6070 - DNA, 23 bp, Artificial Sequence
  HLA-A targeting gRNA
gaggggacagggaggagtcaggg

SEQ ID NO: 6071 - DNA, 23 bp, Artificial Sequence
  HLA-A targeting gRNA
gaggggactgggaggaagcaggg

SEQ ID NO: 6072 - DNA, 23 bp, Artificial Sequence
  HLA-A targeting gRNA
gaggggactgggaggaggcaggg

SEQ ID NO: 6073 - DNA, 23 bp, Artificial Sequence
  HLA-A targeting gRNA
gaggggagccccgggcgccgtgg

SEQ ID NO: 6074 - DNA, 23 bp, Artificial Sequence
  HLA-A targeting gRNA
gaggggagccgcaggcgccgtgg

SEQ ID NO: 6075 - DNA, 23 bp, Artificial Sequence
  HLA-A targeting gRNA
gaggggagccgcgggagccgtgg

SEQ ID NO: 6076 - DNA, 23 bp, Artificial Sequence
  HLA-A targeting gRNA
gaggggagccgcgggcgccgtgg

SEQ ID NO: 6077 - DNA, 23 bp, Artificial Sequence
  HLA-A targeting gRNA
gaggggcccgaccctcctcccgg

SEQ ID NO: 6078 - DNA, 23 bp, Artificial Sequence
  HLA-A targeting gRNA
gaggggccggaatattgggacgg

SEQ ID NO: 6079 - DNA, 23 bp, Artificial Sequence
  HLA-A targeting gRNA
gaggggccggacggagtattggg

SEQ ID NO: 6080 - DNA, 23 bp, Artificial Sequence
  HLA-A targeting gRNA
gaggggcttcggtaaggaggggg

SEQ ID NO: 6081 - DNA, 23 bp, Artificial Sequence
  HLA-A targeting gRNA
gaggggtcatatctcttctcagg

SEQ ID NO: 6082 - DNA, 23 bp, Artificial Sequence
  HLA-A targeting gRNA
gaggggtcatatctgttctcagg

SEQ ID NO: 6083 - DNA, 23 bp, Artificial Sequence
  HLA-A targeting gRNA
gaggggtcatgtgtcttctcagg

SEQ ID NO: 6084 - DNA, 23 bp, Artificial Sequence
  HLA-A targeting gRNA
gaggggtgatgtgtcttctcagg

SEQ ID NO: 6085 - DNA, 23 bp, Artificial Sequence
  HLA-A targeting gRNA
gagggtctgggcgggtcccgcgg

SEQ ID NO: 6086 - DNA, 23 bp, Artificial Sequence
  HLA-A targeting gRNA
gagggtttgggcgggtcccgcgg

SEQ ID NO: 6087 - DNA, 23 bp, Artificial Sequence
  HLA-A targeting gRNA
gaggttcccctaaaatcacatgg

SEQ ID NO: 6088 - DNA, 23 bp, Artificial Sequence
  HLA-A targeting gRNA
gaggttcccctaagatcacatgg

SEQ ID NO: 6089 - DNA, 23 bp, Artificial Sequence
  HLA-A targeting gRNA
gaggttcccctaagatcgcatgg

SEQ ID NO: 6090 - DNA, 23 bp, Artificial Sequence
  HLA-A targeting gRNA
gaggttcccctaagattgcatgg

SEQ ID NO: 6091 - DNA, 23 bp, Artificial Sequence
  HLA-A targeting gRNA
gaggttcctctaagatctcatgg

SEQ ID NO: 6092 - DNA, 23 bp, Artificial Sequence
  HLA-A targeting gRNA
gaggttctgggcgggtcccgcgg

SEQ ID NO: 6093 - DNA, 23 bp, Artificial Sequence
  HLA-A targeting gRNA
gagtccaagaggggagccgcagg

SEQ ID NO: 6094 - DNA, 23 bp, Artificial Sequence
  HLA-A targeting gRNA
gagtccaagaggggagccgcggg

SEQ ID NO: 6095 - DNA, 23 bp, Artificial Sequence
  HLA-A targeting gRNA
gagtcccgcttcatctcagtggg

SEQ ID NO: 6096 - DNA, 23 bp, Artificial Sequence
  HLA-A targeting gRNA
gagtccgagaaggggagccgcgg

SEQ ID NO: 6097 - DNA, 23 bp, Artificial Sequence
  HLA-A targeting gRNA
gagtccgagagaggagccgcggg

SEQ ID NO: 6098 - DNA, 23 bp, Artificial Sequence
  HLA-A targeting gRNA
gagtccgagaggggagccccggg

SEQ ID NO: 6099 - DNA, 23 bp, Artificial Sequence
  HLA-A targeting gRNA
gagtccgagaggggagccgcggg

SEQ ID NO: 6100 - DNA, 23 bp, Artificial Sequence
  HLA-A targeting gRNA
gagtccgaggaaggagccgcggg

SEQ ID NO: 6101 - DNA, 23 bp, Artificial Sequence
  HLA-A targeting gRNA
gagtccgaggacggagccccggg

SEQ ID NO: 6102 - DNA, 23 bp, Artificial Sequence
  HLA-A targeting gRNA
gagtccgaggacggagccctggg

SEQ ID NO: 6103 - DNA, 23 bp, Artificial Sequence
  HLA-A targeting gRNA
gagtccgaggatggagccccggg

SEQ ID NO: 6104 - DNA, 23 bp, Artificial Sequence
  HLA-A targeting gRNA
gagtccgaggatggcgccccggg

SEQ ID NO: 6105 - DNA, 23 bp, Artificial Sequence
  HLA-A targeting gRNA
gagtccgaggatggcgccctggg

SEQ ID NO: 6106 - DNA, 23 bp, Artificial Sequence
  HLA-A targeting gRNA
gagtccgaggggggagccgcggg

SEQ ID NO: 6107 - DNA, 23 bp, Artificial Sequence
  HLA-A targeting gRNA
gagtcctgcagcctccactcagg

SEQ ID NO: 6108 - DNA, 23 bp, Artificial Sequence
  HLA-A targeting gRNA
gagtccttcggcctccactcagg

SEQ ID NO: 6109 - DNA, 23 bp, Artificial Sequence
  HLA-A targeting gRNA
gagtctctcatcacttgtaaagg

SEQ ID NO: 6110 - DNA, 23 bp, Artificial Sequence
  HLA-A targeting gRNA
gagtctctcatcgcttgtaaagg

SEQ ID NO: 6111 - DNA, 23 bp, Artificial Sequence
  HLA-A targeting gRNA
gagtctctgagcggggaacaggg

SEQ ID NO: 6112 - DNA, 23 bp, Artificial Sequence
  HLA-A targeting gRNA
gagtctctgagtggggaacaggg

SEQ ID NO: 6113 - DNA, 23 bp, Artificial Sequence
  HLA-A targeting gRNA
gagtgcgtggagtggctccgcgg

SEQ ID NO: 6114 - DNA, 23 bp, Artificial Sequence
  HLA-A targeting gRNA
gagtggctccgcagatacctggg

SEQ ID NO: 6115 - DNA, 23 bp, Artificial Sequence
  HLA-A targeting gRNA
gagtgggcaggggggtggtgggg

SEQ ID NO: 6116 - DNA, 23 bp, Artificial Sequence
  HLA-A targeting gRNA
gagtgggcgggggggcggggagg

SEQ ID NO: 6117 - DNA, 23 bp, Artificial Sequence
  HLA-A targeting gRNA
gagtgggcggggggggggtgggg

SEQ ID NO: 6118 - DNA, 23 bp, Artificial Sequence
  HLA-A targeting gRNA
gagtgggcggggggggtggtggg

SEQ ID NO: 6119 - DNA, 23 bp, Artificial Sequence
  HLA-A targeting gRNA
gagttcttcagcctccactcagg

SEQ ID NO: 6120 - DNA, 23 bp, Artificial Sequence
  HLA-A targeting gRNA
gagttttcttgtcccactggggg

SEQ ID NO: 6121 - DNA, 23 bp, Artificial Sequence
  HLA-A targeting gRNA
gatagagcaggaggtgccggagg

SEQ ID NO: 6122 - DNA, 23 bp, Artificial Sequence
  HLA-A targeting gRNA
gatagtcacatgggcgctgttgg

SEQ ID NO: 6123 - DNA, 23 bp, Artificial Sequence
  HLA-A targeting gRNA
gatcacactgacctggcagtggg

SEQ ID NO: 6124 - DNA, 23 bp, Artificial Sequence
  HLA-A targeting gRNA
gatcacactgacctggtagcggg

SEQ ID NO: 6125 - DNA, 23 bp, Artificial Sequence
  HLA-A targeting gRNA
gatcacactgatctggcagtggg

SEQ ID NO: 6126 - DNA, 23 bp, Artificial Sequence
  HLA-A targeting gRNA
gatcacccagcacaagttggagg

SEQ ID NO: 6127 - DNA, 23 bp, Artificial Sequence
  HLA-A targeting gRNA
gatcacccagcccaagtgggagg

SEQ ID NO: 6128 - DNA, 23 bp, Artificial Sequence
  HLA-A targeting gRNA
gatcacccagcccaagttggagg

SEQ ID NO: 6129 - DNA, 23 bp, Artificial Sequence
  HLA-A targeting gRNA
gatcacccagcgcaaatgggagg

SEQ ID NO: 6130 - DNA, 23 bp, Artificial Sequence
  HLA-A targeting gRNA
gatcacccagcgcaagttggagg

SEQ ID NO: 6131 - DNA, 23 bp, Artificial Sequence
  HLA-A targeting gRNA
gatcacccagcgtaagtgggagg

SEQ ID NO: 6132 - DNA, 23 bp, Artificial Sequence
  HLA-A targeting gRNA
gatcacccagctcaagtgggagg

SEQ ID NO: 6133 - DNA, 23 bp, Artificial Sequence
  HLA-A targeting gRNA
gatcactcagcgcaagttggagg

SEQ ID NO: 6134 - DNA, 23 bp, Artificial Sequence
  HLA-A targeting gRNA
gatcatccagcgcaagtgggagg

SEQ ID NO: 6135 - DNA, 23 bp, Artificial Sequence
  HLA-A targeting gRNA
gatccacccccctgaggccgcgg

SEQ ID NO: 6136 - DNA, 23 bp, Artificial Sequence
  HLA-A targeting gRNA
gatcccgcactcaccggcccagg

SEQ ID NO: 6137 - DNA, 23 bp, Artificial Sequence
  HLA-A targeting gRNA
gatccgaccccctgaggccgcgg

SEQ ID NO: 6138 - DNA, 23 bp, Artificial Sequence
  HLA-A targeting gRNA
gatccgcccccctgaggccgcgg

SEQ ID NO: 6139 - DNA, 23 bp, Artificial Sequence
  HLA-A targeting gRNA
gatccgccccctgaggccgcggg

SEQ ID NO: 6140 - DNA, 23 bp, Artificial Sequence
  HLA-A targeting gRNA
gatccgcctccctgaggccgcgg

SEQ ID NO: 6141 - DNA, 23 bp, Artificial Sequence
  HLA-A targeting gRNA
gatctcagacccggagactcggg

SEQ ID NO: 6142 - DNA, 23 bp, Artificial Sequence
  HLA-A targeting gRNA
gatctcagaccgggagactcggg

SEQ ID NO: 6143 - DNA, 23 bp, Artificial Sequence
  HLA-A targeting gRNA
gatctcagaccgggagacttggg

SEQ ID NO: 6144 - DNA, 23 bp, Artificial Sequence
  HLA-A targeting gRNA
gatctcagacggggagactcggg

SEQ ID NO: 6145 - DNA, 23 bp, Artificial Sequence
  HLA-A targeting gRNA
gatctcagacggggagactctgg

SEQ ID NO: 6146 - DNA, 23 bp, Artificial Sequence
  HLA-A targeting gRNA
gatctcccagcgcaagtgggagg

SEQ ID NO: 6147 - DNA, 23 bp, Artificial Sequence
  HLA-A targeting gRNA
gatctcccagcgcaagttggagg

SEQ ID NO: 6148 - DNA, 23 bp, Artificial Sequence
  HLA-A targeting gRNA
gatctcggacccggagactcggg

SEQ ID NO: 6149 - DNA, 23 bp, Artificial Sequence
  HLA-A targeting gRNA
gatctcggaccctgagactcggg

SEQ ID NO: 6150 - DNA, 23 bp, Artificial Sequence
  HLA-A targeting gRNA
gatctgagccgccgtgtccgcgg

SEQ ID NO: 6151 - DNA, 23 bp, Artificial Sequence
  HLA-A targeting gRNA
gatctgagccgccttgtccgcgg

SEQ ID NO: 6152 - DNA, 23 bp, Artificial Sequence
  HLA-A targeting gRNA
gatctgagccgcggtatccgcgg

SEQ ID NO: 6153 - DNA, 23 bp, Artificial Sequence
  HLA-A targeting gRNA
gatctgagccgcggtgtccgcgg

SEQ ID NO: 6154 - DNA, 23 bp, Artificial Sequence
  HLA-A targeting gRNA
gatctgagccgctgtgtccccgg

SEQ ID NO: 6155 - DNA, 23 bp, Artificial Sequence
  HLA-A targeting gRNA
gatctgagccgctgtgtccgcgg

SEQ ID NO: 6156 - DNA, 23 bp, Artificial Sequence
  HLA-A targeting gRNA
gatctggcagtgggatggggagg

SEQ ID NO: 6157 - DNA, 23 bp, Artificial Sequence
  HLA-A targeting gRNA
gatcttcaagaccaacacacagg

SEQ ID NO: 6158 - DNA, 23 bp, Artificial Sequence
  HLA-A targeting gRNA
gatgcccaagttggggatggtgg

SEQ ID NO: 6159 - DNA, 23 bp, Artificial Sequence
  HLA-A targeting gRNA
gatgcccatgatggggatggtgg

SEQ ID NO: 6160 - DNA, 23 bp, Artificial Sequence
  HLA-A targeting gRNA
gatgctgcatcccagtaatgagg

SEQ ID NO: 6161 - DNA, 23 bp, Artificial Sequence
  HLA-A targeting gRNA
gatgctgcttcccagtaatgagg

SEQ ID NO: 6162 - DNA, 23 bp, Artificial Sequence
  HLA-A targeting gRNA
gatggtcacatgggcactgttgg

SEQ ID NO: 6163 - DNA, 23 bp, Artificial Sequence
  HLA-A targeting gRNA
gatggtcacatgggcgctgctgg

SEQ ID NO: 6164 - DNA, 23 bp, Artificial Sequence
  HLA-A targeting gRNA
gatggtcacatgggcgctgttgg

SEQ ID NO: 6165 - DNA, 23 bp, Artificial Sequence
  HLA-A targeting gRNA
gatggtcacatgggtgctgttgg

SEQ ID NO: 6166 - DNA, 23 bp, Artificial Sequence
  HLA-A targeting gRNA
gatgtaagccttgccgtcgtagg

SEQ ID NO: 6167 - DNA, 23 bp, Artificial Sequence
  HLA-A targeting gRNA
gatgtaatccctgccgtcgtagg

SEQ ID NO: 6168 - DNA, 23 bp, Artificial Sequence
  HLA-A targeting gRNA
gatgtaatccttgccatcgtagg

SEQ ID NO: 6169 - DNA, 23 bp, Artificial Sequence
  HLA-A targeting gRNA
gatgtaatccttgccgtcctagg

SEQ ID NO: 6170 - DNA, 23 bp, Artificial Sequence
  HLA-A targeting gRNA
gatgtaatccttgccgtcgcagg

SEQ ID NO: 6171 - DNA, 23 bp, Artificial Sequence
  HLA-A targeting gRNA
gatgtaatctttgccgtcgtagg

SEQ ID NO: 6172 - DNA, 23 bp, Artificial Sequence
  HLA-A targeting gRNA
gatgtatcaccttgatattatgg

SEQ ID NO: 6173 - DNA, 23 bp, Artificial Sequence
  HLA-A targeting gRNA
gatgtcatccttgccgtcgtagg

SEQ ID NO: 6174 - DNA, 23 bp, Artificial Sequence
  HLA-A targeting gRNA
gattacccagcgcaagttggagg

SEQ ID NO: 6175 - DNA, 23 bp, Artificial Sequence
  HLA-A targeting gRNA
gattccagcatcatgagtcaggg

SEQ ID NO: 6176 - DNA, 23 bp, Artificial Sequence
  HLA-A targeting gRNA
gattccagcattcatgagtcagg

SEQ ID NO: 6177 - DNA, 23 bp, Artificial Sequence
  HLA-A targeting gRNA
gattccagcattcatgagtcggg

SEQ ID NO: 6178 - DNA, 23 bp, Artificial Sequence
  HLA-A targeting gRNA
gattccagcattcgtgagtcagg

SEQ ID NO: 6179 - DNA, 23 bp, Artificial Sequence
  HLA-A targeting gRNA
gatttcagcattcatgagtcagg

SEQ ID NO: 6180 - DNA, 23 bp, Artificial Sequence
  HLA-A targeting gRNA
gcaacggagagcctacctggagg

SEQ ID NO: 6181 - DNA, 23 bp, Artificial Sequence
  HLA-A targeting gRNA
gcaagaggggccggagtattggg

SEQ ID NO: 6182 - DNA, 23 bp, Artificial Sequence
  HLA-A targeting gRNA
gcaagttggaggcggcccgtggg

SEQ ID NO: 6183 - DNA, 23 bp, Artificial Sequence
  HLA-A targeting gRNA
gcaatggggaggcgcagcgttgg

SEQ ID NO: 6184 - DNA, 23 bp, Artificial Sequence
  HLA-A targeting gRNA
gcacagaacccagacaccagcgg

SEQ ID NO: 6185 - DNA, 23 bp, Artificial Sequence
  HLA-A targeting gRNA
gcacagggcccagcacctcaggg

SEQ ID NO: 6186 - DNA, 23 bp, Artificial Sequence
  HLA-A targeting gRNA
gcacatgtgacaatgaaagacgg

SEQ ID NO: 6187 - DNA, 23 bp, Artificial Sequence
  HLA-A targeting gRNA
gcacatgtgacaatgaagcacgg

SEQ ID NO: 6188 - DNA, 23 bp, Artificial Sequence
  HLA-A targeting gRNA
gcacatgtgacaatgaaggacgg

SEQ ID NO: 6189 - DNA, 23 bp, Artificial Sequence
  HLA-A targeting gRNA
gcacatgtgacaatgaaggatgg

SEQ ID NO: 6190 - DNA, 23 bp, Artificial Sequence
  HLA-A targeting gRNA
gcaccgtgacttttcctctcagg

SEQ ID NO: 6191 - DNA, 23 bp, Artificial Sequence
  HLA-A targeting gRNA
gcacggatgtatcaccttgatgg

SEQ ID NO: 6192 - DNA, 23 bp, Artificial Sequence
  HLA-A targeting gRNA
gcacgggccgcctccaacttggg

SEQ ID NO: 6193 - DNA, 23 bp, Artificial Sequence
  HLA-A targeting gRNA
gcactcacaggcccaggtctcgg

SEQ ID NO: 6194 - DNA, 23 bp, Artificial Sequence
  HLA-A targeting gRNA
gcactcaccagcccaggtctcgg

SEQ ID NO: 6195 - DNA, 23 bp, Artificial Sequence
  HLA-A targeting gRNA
gcactcacccgcccaggtctcgg

SEQ ID NO: 6196 - DNA, 23 bp, Artificial Sequence
  HLA-A targeting gRNA
gcactcaccggcccaggtctcgg

SEQ ID NO: 6197 - DNA, 23 bp, Artificial Sequence
  HLA-A targeting gRNA
gcactggggaggcgccgcgttgg

SEQ ID NO: 6198 - DNA, 23 bp, Artificial Sequence
  HLA-A targeting gRNA
gcagccaaacatccactggaggg

SEQ ID NO: 6199 - DNA, 23 bp, Artificial Sequence
  HLA-A targeting gRNA
gcagccaaacatcctctggaggg

SEQ ID NO: 6200 - DNA, 23 bp, Artificial Sequence
  HLA-A targeting gRNA
gcagccacacatccactggaggg

SEQ ID NO: 6201 - DNA, 23 bp, Artificial Sequence
  HLA-A targeting gRNA
gcagccagacatcctctggaggg

SEQ ID NO: 6202 - DNA, 23 bp, Artificial Sequence
  HLA-A targeting gRNA
gcagccagacatcctctggatgg

SEQ ID NO: 6203 - DNA, 23 bp, Artificial Sequence
  HLA-A targeting gRNA
gcagccatacatattctggaggg

SEQ ID NO: 6204 - DNA, 23 bp, Artificial Sequence
  HLA-A targeting gRNA
gcagccatacatccactggaggg

SEQ ID NO: 6205 - DNA, 23 bp, Artificial Sequence
  HLA-A targeting gRNA
gcagccatacatccgctggaggg

SEQ ID NO: 6206 - DNA, 23 bp, Artificial Sequence
  HLA-A targeting gRNA
gcagccatacatcctctggaagg

SEQ ID NO: 6207 - DNA, 23 bp, Artificial Sequence
  HLA-A targeting gRNA
gcagccatacatgctctggaggg

SEQ ID NO: 6208 - DNA, 23 bp, Artificial Sequence
  HLA-A targeting gRNA
gcagcccctcatgctgcacatgg

SEQ ID NO: 6209 - DNA, 23 bp, Artificial Sequence
  HLA-A targeting gRNA
gcagcccctcatgctgtacatgg

SEQ ID NO: 6210 - DNA, 23 bp, Artificial Sequence
  HLA-A targeting gRNA
gcagcccctcatgctgtacctgg

SEQ ID NO: 6211 - DNA, 23 bp, Artificial Sequence
  HLA-A targeting gRNA
gcagcccctcgtgctgaacatgg

SEQ ID NO: 6212 - DNA, 23 bp, Artificial Sequence
  HLA-A targeting gRNA
gcagcccctcgtgctgcacatgg

SEQ ID NO: 6213 - DNA, 23 bp, Artificial Sequence
  HLA-A targeting gRNA
gcagcccctcgtgctgcatatgg

SEQ ID NO: 6214 - DNA, 23 bp, Artificial Sequence
  HLA-A targeting gRNA
gcagccgggccgggacatggcgg

SEQ ID NO: 6215 - DNA, 23 bp, Artificial Sequence
  HLA-A targeting gRNA
gcagccgtacaagctctggaggg

SEQ ID NO: 6216 - DNA, 23 bp, Artificial Sequence
  HLA-A targeting gRNA
gcagccgtacatccactggaggg

SEQ ID NO: 6217 - DNA, 23 bp, Artificial Sequence
  HLA-A targeting gRNA
gcagccgtacatcctctggaggg

SEQ ID NO: 6218 - DNA, 23 bp, Artificial Sequence
  HLA-A targeting gRNA
gcagccgtacatcctctggatgg

SEQ ID NO: 6219 - DNA, 23 bp, Artificial Sequence
  HLA-A targeting gRNA
gcagccgtacatcctctggcggg

SEQ ID NO: 6220 - DNA, 23 bp, Artificial Sequence
  HLA-A targeting gRNA
gcagccgtacatcgtctggaggg

SEQ ID NO: 6221 - DNA, 23 bp, Artificial Sequence
  HLA-A targeting gRNA
gcagccgtacatgctctggaggg

SEQ ID NO: 6222 - DNA, 23 bp, Artificial Sequence
  HLA-A targeting gRNA
gcagcggagaacctacctggagg

SEQ ID NO: 6223 - DNA, 23 bp, Artificial Sequence
  HLA-A targeting gRNA
gcagcggagagcctacctggagg

SEQ ID NO: 6224 - DNA, 23 bp, Artificial Sequence
  HLA-A targeting gRNA
gcagctaagagcctacctggagg

SEQ ID NO: 6225 - DNA, 23 bp, Artificial Sequence
  HLA-A targeting gRNA
gcagctgagaacctacctggagg

SEQ ID NO: 6226 - DNA, 23 bp, Artificial Sequence
  HLA-A targeting gRNA
gcagctgagagcctaccgggagg

SEQ ID NO: 6227 - DNA, 23 bp, Artificial Sequence
  HLA-A targeting gRNA
gcagctgagagcctacctggtgg

SEQ ID NO: 6228 - DNA, 23 bp, Artificial Sequence
  HLA-A targeting gRNA
gcagctgagagcctgcctggagg

SEQ ID NO: 6229 - DNA, 23 bp, Artificial Sequence
  HLA-A targeting gRNA
gcagctgtgatggtgccttctgg

SEQ ID NO: 6230 - DNA, 23 bp, Artificial Sequence
  HLA-A targeting gRNA
gcagctgtggtggtgccttctgg

SEQ ID NO: 6231 - DNA, 23 bp, Artificial Sequence
  HLA-A targeting gRNA
gcaggacagagcctacctggagg

SEQ ID NO: 6232 - DNA, 23 bp, Artificial Sequence
  HLA-A targeting gRNA
gcaggaccatgagatcttagagg

SEQ ID NO: 6233 - DNA, 23 bp, Artificial Sequence
  HLA-A targeting gRNA
gcaggaggggccagagtattggg

SEQ ID NO: 6234 - DNA, 23 bp, Artificial Sequence
  HLA-A targeting gRNA
gcaggaggggccggaatattggg

SEQ ID NO: 6235 - DNA, 23 bp, Artificial Sequence
  HLA-A targeting gRNA
gcaggaggggccggagcattggg

SEQ ID NO: 6236 - DNA, 23 bp, Artificial Sequence
  HLA-A targeting gRNA
gcaggaggggccggagtactggg

SEQ ID NO: 6237 - DNA, 23 bp, Artificial Sequence
  HLA-A targeting gRNA
gcaggaggggccggagtattagg

SEQ ID NO: 6238 - DNA, 23 bp, Artificial Sequence
  HLA-A targeting gRNA
gcaggaggggccggagtgttggg

SEQ ID NO: 6239 - DNA, 23 bp, Artificial Sequence
  HLA-A targeting gRNA
gcaggaggggctggagtattggg

SEQ ID NO: 6240 - DNA, 23 bp, Artificial Sequence
  HLA-A targeting gRNA
gcaggaggtgccggaggattggg

SEQ ID NO: 6241 - DNA, 23 bp, Artificial Sequence
  HLA-A targeting gRNA
gcaggatccgcaggctctctcgg

SEQ ID NO: 6242 - DNA, 23 bp, Artificial Sequence
  HLA-A targeting gRNA
gcaggcgccgtgggtggagcagg

SEQ ID NO: 6243 - DNA, 23 bp, Artificial Sequence
  HLA-A targeting gRNA
gcaggcgggggcgcaggacccgg

SEQ ID NO: 6244 - DNA, 23 bp, Artificial Sequence
  HLA-A targeting gRNA
gcaggcgggggctcaggacccgg

SEQ ID NO: 6245 - DNA, 23 bp, Artificial Sequence
  HLA-A targeting gRNA
gcagggaaatggcctctgtaggg

SEQ ID NO: 6246 - DNA, 23 bp, Artificial Sequence
  HLA-A targeting gRNA
gcagggaaatggcctctgtgggg

SEQ ID NO: 6247 - DNA, 23 bp, Artificial Sequence
  HLA-A targeting gRNA
gcagggaacacttctacctgggg

SEQ ID NO: 6248 - DNA, 23 bp, Artificial Sequence
  HLA-A targeting gRNA
gcagggccatgagatcttagagg

SEQ ID NO: 6249 - DNA, 23 bp, Artificial Sequence
  HLA-A targeting gRNA
gcagggccatgcaatcttagggg

SEQ ID NO: 6250 - DNA, 23 bp, Artificial Sequence
  HLA-A targeting gRNA
gcagggccatgcgatcttagggg

SEQ ID NO: 6251 - DNA, 23 bp, Artificial Sequence
  HLA-A targeting gRNA
gcagggccatgtgatcttagggg

SEQ ID NO: 6252 - DNA, 23 bp, Artificial Sequence
  HLA-A targeting gRNA
gcagggccatgtgattttagggg

SEQ ID NO: 6253 - DNA, 23 bp, Artificial Sequence
  HLA-A targeting gRNA
gcaggggggtggtggggcagagg

SEQ ID NO: 6254 - DNA, 23 bp, Artificial Sequence
  HLA-A targeting gRNA
gcagggtccgcaggctctctcgg

SEQ ID NO: 6255 - DNA, 23 bp, Artificial Sequence
  HLA-A targeting gRNA
gcagggtccgcaggtcctctcgg

SEQ ID NO: 6256 - DNA, 23 bp, Artificial Sequence
  HLA-A targeting gRNA
gcaggttccgcaggcccactcgg

SEQ ID NO: 6257 - DNA, 23 bp, Artificial Sequence
  HLA-A targeting gRNA
gcaggttccgcaggctcactcgg

SEQ ID NO: 6258 - DNA, 23 bp, Artificial Sequence
  HLA-A targeting gRNA
gcaggttccgcaggctctctcgg

SEQ ID NO: 6259 - DNA, 23 bp, Artificial Sequence
  HLA-A targeting gRNA
gcaggttccgcaggtcctctcgg

SEQ ID NO: 6260 - DNA, 23 bp, Artificial Sequence
  HLA-A targeting gRNA
gcaggttccgcaggttcactcgg

SEQ ID NO: 6261 - DNA, 23 bp, Artificial Sequence
  HLA-A targeting gRNA
gcaggttccgcaggttctctcgg

SEQ ID NO: 6262 - DNA, 23 bp, Artificial Sequence
  HLA-A targeting gRNA
gcaggtttcgcaggctctctcgg

SEQ ID NO: 6263 - DNA, 23 bp, Artificial Sequence
  HLA-A targeting gRNA
gcagtatgcctacgacggcaagg

SEQ ID NO: 6264 - DNA, 23 bp, Artificial Sequence
  HLA-A targeting gRNA
gcagtgcagagcctacctggagg

SEQ ID NO: 6265 - DNA, 23 bp, Artificial Sequence
  HLA-A targeting gRNA
gcagtggagagcccacctggagg

SEQ ID NO: 6266 - DNA, 23 bp, Artificial Sequence
  HLA-A targeting gRNA
gcagtggagagtctacctggagg

SEQ ID NO: 6267 - DNA, 23 bp, Artificial Sequence
  HLA-A targeting gRNA
gcagtggtcaaagtggtcaaagg

SEQ ID NO: 6268 - DNA, 23 bp, Artificial Sequence
  HLA-A targeting gRNA
gcagtggtcgaagtggtcaaagg

SEQ ID NO: 6269 - DNA, 23 bp, Artificial Sequence
  HLA-A targeting gRNA
gcagttgccgcaggttcactcgg

SEQ ID NO: 6270 - DNA, 23 bp, Artificial Sequence
  HLA-A targeting gRNA
gcagtttccgcaggctcactcgg

SEQ ID NO: 6271 - DNA, 23 bp, Artificial Sequence
  HLA-A targeting gRNA
gcagtttccgcaggttcactcgg

SEQ ID NO: 6272 - DNA, 23 bp, Artificial Sequence
  HLA-A targeting gRNA
gcagtttccgcaggttcattcgg

SEQ ID NO: 6273 - DNA, 23 bp, Artificial Sequence
  HLA-A targeting gRNA
gcatggcctcccacgaggagggg

SEQ ID NO: 6274 - DNA, 23 bp, Artificial Sequence
  HLA-A targeting gRNA
gcatgtacggctgcgacctgggg

SEQ ID NO: 6275 - DNA, 23 bp, Artificial Sequence
  HLA-A targeting gRNA
gcatgtacggctgcgacgtgggg

SEQ ID NO: 6276 - DNA, 23 bp, Artificial Sequence
  HLA-A targeting gRNA
gcatgtatggctgcgacgtgggg

SEQ ID NO: 6277 - DNA, 23 bp, Artificial Sequence
  HLA-A targeting gRNA
gcattggggaggcgcagcattgg

SEQ ID NO: 6278 - DNA, 23 bp, Artificial Sequence
  HLA-A targeting gRNA
gcattggggaggcgcagcgttgg

SEQ ID NO: 6279 - DNA, 23 bp, Artificial Sequence
  HLA-A targeting gRNA
gcattggggaggcgccgcgttgg

SEQ ID NO: 6280 - DNA, 23 bp, Artificial Sequence
  HLA-A targeting gRNA
gccacgtcccggcccggccgcgg

SEQ ID NO: 6281 - DNA, 23 bp, Artificial Sequence
  HLA-A targeting gRNA
gccagaaacgatgcccaagttgg

SEQ ID NO: 6282 - DNA, 23 bp, Artificial Sequence
  HLA-A targeting gRNA
gccagaccctcctcccggcgcgg

SEQ ID NO: 6283 - DNA, 23 bp, Artificial Sequence
  HLA-A targeting gRNA
gccagcaacaatgcccacgatgg

SEQ ID NO: 6284 - DNA, 23 bp, Artificial Sequence
  HLA-A targeting gRNA
gccagcaacgatgcccacgatgg

SEQ ID NO: 6285 - DNA, 23 bp, Artificial Sequence
  HLA-A targeting gRNA
gccagcaacgatgcccatgatgg

SEQ ID NO: 6286 - DNA, 23 bp, Artificial Sequence
  HLA-A targeting gRNA
gccaggacagccaggacagctgg

SEQ ID NO: 6287 - DNA, 23 bp, Artificial Sequence
  HLA-A targeting gRNA
gccagggtctcacatcatccagg

SEQ ID NO: 6288 - DNA, 23 bp, Artificial Sequence
  HLA-A targeting gRNA
gccaggtcagggctgaggcttgg

SEQ ID NO: 6289 - DNA, 23 bp, Artificial Sequence
  HLA-A targeting gRNA
gccagtgagtgaccccggcccgg

SEQ ID NO: 6290 - DNA, 23 bp, Artificial Sequence
  HLA-A targeting gRNA
gccatgacccggcccggccgcgg

SEQ ID NO: 6291 - DNA, 23 bp, Artificial Sequence
  HLA-A targeting gRNA
gccatgtcccggcccggccgcgg

SEQ ID NO: 6292 - DNA, 23 bp, Artificial Sequence
  HLA-A targeting gRNA
gccatgtcccggcccggccgtgg

SEQ ID NO: 6293 - DNA, 23 bp, Artificial Sequence
  HLA-A targeting gRNA
gccatgtcccggcccggctgcgg

SEQ ID NO: 6294 - DNA, 23 bp, Artificial Sequence
  HLA-A targeting gRNA
gccatgtcccggcctggccgcgg

SEQ ID NO: 6295 - DNA, 23 bp, Artificial Sequence
  HLA-A targeting gRNA
gccattctccattcaacggaggg

SEQ ID NO: 6296 - DNA, 23 bp, Artificial Sequence
  HLA-A targeting gRNA
gccattctccattcaagggaggg

SEQ ID NO: 6297 - DNA, 23 bp, Artificial Sequence
  HLA-A targeting gRNA
gcccacaggagacgtgggacagg

SEQ ID NO: 6298 - DNA, 23 bp, Artificial Sequence
  HLA-A targeting gRNA
gcccatggcccagcacctcaggg

SEQ ID NO: 6299 - DNA, 23 bp, Artificial Sequence
  HLA-A targeting gRNA
gccccgccccgaccaacccgcgg

SEQ ID NO: 6300 - DNA, 23 bp, Artificial Sequence
  HLA-A targeting gRNA
gccccgccccgcccaacccgcgg

SEQ ID NO: 6301 - DNA, 23 bp, Artificial Sequence
  HLA-A targeting gRNA
gccccgccctgaccaacccgcgg

SEQ ID NO: 6302 - DNA, 23 bp, Artificial Sequence
  HLA-A targeting gRNA
gcccgacccacctcccggcgcgg

SEQ ID NO: 6303 - DNA, 23 bp, Artificial Sequence
  HLA-A targeting gRNA
gcccgacccacctccctgcgcgg

SEQ ID NO: 6304 - DNA, 23 bp, Artificial Sequence
  HLA-A targeting gRNA
gcccgaccctcctaccggcgcgg

SEQ ID NO: 6305 - DNA, 23 bp, Artificial Sequence
  HLA-A targeting gRNA
gcccgaccctcctccctgcgcgg

SEQ ID NO: 6306 - DNA, 23 bp, Artificial Sequence
  HLA-A targeting gRNA
gcccgcaggagacgtgggacagg

SEQ ID NO: 6307 - DNA, 23 bp, Artificial Sequence
  HLA-A targeting gRNA
gcccgcaggagacgttggacagg

SEQ ID NO: 6308 - DNA, 23 bp, Artificial Sequence
  HLA-A targeting gRNA
gcccgggatggcctcccacgagg

SEQ ID NO: 6309 - DNA, 23 bp, Artificial Sequence
  HLA-A targeting gRNA
gccctcaggagacgtgggacagg

SEQ ID NO: 6310 - DNA, 23 bp, Artificial Sequence
  HLA-A targeting gRNA
gccctcccttgaatggaaaatgg

SEQ ID NO: 6311 - DNA, 23 bp, Artificial Sequence
  HLA-A targeting gRNA
gccctcccttgaatggagaatgg

SEQ ID NO: 6312 - DNA, 23 bp, Artificial Sequence
  HLA-A targeting gRNA
gccctccgttgaatggagaatgg

SEQ ID NO: 6313 - DNA, 23 bp, Artificial Sequence
  HLA-A targeting gRNA
gccctcctcctgctgctctcggg

SEQ ID NO: 6314 - DNA, 23 bp, Artificial Sequence
  HLA-A targeting gRNA
gccctgaccgagacctgggccgg

SEQ ID NO: 6315 - DNA, 23 bp, Artificial Sequence
  HLA-A targeting gRNA
gccctgaccgagacctgggcggg

SEQ ID NO: 6316 - DNA, 23 bp, Artificial Sequence
  HLA-A targeting gRNA
gccctgaccgagacctgggctgg

SEQ ID NO: 6317 - DNA, 23 bp, Artificial Sequence
  HLA-A targeting gRNA
gccctgatcgagacctggaccgg

SEQ ID NO: 6318 - DNA, 23 bp, Artificial Sequence
  HLA-A targeting gRNA
gccctgatcgagacctgggccgg

SEQ ID NO: 6319 - DNA, 23 bp, Artificial Sequence
  HLA-A targeting gRNA
gccgaaggactcagaaaagctgg

SEQ ID NO: 6320 - DNA, 23 bp, Artificial Sequence
  HLA-A targeting gRNA
gccgaaggactcagaaaagttgg

SEQ ID NO: 6321 - DNA, 23 bp, Artificial Sequence
  HLA-A targeting gRNA
gccgcgcagggaggagggtcggg

SEQ ID NO: 6322 - DNA, 23 bp, Artificial Sequence
  HLA-A targeting gRNA
gccgcgcagggaggtgggtcggg

SEQ ID NO: 6323 - DNA, 23 bp, Artificial Sequence
  HLA-A targeting gRNA
gccgcgccgggaggagggtctgg

SEQ ID NO: 6324 - DNA, 23 bp, Artificial Sequence
  HLA-A targeting gRNA
gccgcgccgggaggtgggtcggg

SEQ ID NO: 6325 - DNA, 23 bp, Artificial Sequence
  HLA-A targeting gRNA
gccgcgccggtaggagggtcggg

SEQ ID NO: 6326 - DNA, 23 bp, Artificial Sequence
  HLA-A targeting gRNA
gccgcgggcgccgtgggtggagg

SEQ ID NO: 6327 - DNA, 23 bp, Artificial Sequence
  HLA-A targeting gRNA
gccggacggagtattgggaccgg

SEQ ID NO: 6328 - DNA, 23 bp, Artificial Sequence
  HLA-A targeting gRNA
gccgggagatctacgggagatgg

SEQ ID NO: 6329 - DNA, 23 bp, Artificial Sequence
  HLA-A targeting gRNA
gccgggccaggacacggatgtgg

SEQ ID NO: 6330 - DNA, 23 bp, Artificial Sequence
  HLA-A targeting gRNA
gccgggtcagggctgaggcttgg

SEQ ID NO: 6331 - DNA, 23 bp, Artificial Sequence
  HLA-A targeting gRNA
gccggtgagtgaccccggcctgg

SEQ ID NO: 6332 - DNA, 23 bp, Artificial Sequence
  HLA-A targeting gRNA
gccggtgagtgcgggtcggcagg

SEQ ID NO: 6333 - DNA, 23 bp, Artificial Sequence
  HLA-A targeting gRNA
gccggtgagtgcgggtcgggagg

SEQ ID NO: 6334 - DNA, 23 bp, Artificial Sequence
  HLA-A targeting gRNA
gccgtacgtcggggttggggagg

SEQ ID NO: 6335 - DNA, 23 bp, Artificial Sequence
  HLA-A targeting gRNA
gccgtccgtgggggatgaggagg

SEQ ID NO: 6336 - DNA, 23 bp, Artificial Sequence
  HLA-A targeting gRNA
gccgtccgtgggggatggggagg

SEQ ID NO: 6337 - DNA, 23 bp, Artificial Sequence
  HLA-A targeting gRNA
gccgtgggtggaggaggggccgg

SEQ ID NO: 6338 - DNA, 23 bp, Artificial Sequence
  HLA-A targeting gRNA
gccgtgtcccggccaggccgcgg

SEQ ID NO: 6339 - DNA, 23 bp, Artificial Sequence
  HLA-A targeting gRNA
gccgtgtcccggcccggccgcgg

SEQ ID NO: 6340 - DNA, 23 bp, Artificial Sequence
  HLA-A targeting gRNA
gccgtgtcccggcctggccgcgg

SEQ ID NO: 6341 - DNA, 23 bp, Artificial Sequence
  HLA-A targeting gRNA
gccgtgtccgccaggagctcagg

SEQ ID NO: 6342 - DNA, 23 bp, Artificial Sequence
  HLA-A targeting gRNA
gccgtgtccgggcccggccgcgg

SEQ ID NO: 6343 - DNA, 23 bp, Artificial Sequence
  HLA-A targeting gRNA
gccgtgtcctggcccggccgcgg

SEQ ID NO: 6344 - DNA, 23 bp, Artificial Sequence
  HLA-A targeting gRNA
gcctaaaccgaaaatgaaaccgg

SEQ ID NO: 6345 - DNA, 23 bp, Artificial Sequence
  HLA-A targeting gRNA
gcctaaactgaaaacgaaaccgg

SEQ ID NO: 6346 - DNA, 23 bp, Artificial Sequence
  HLA-A targeting gRNA
gcctcaactgaaaatgaaaccgg

SEQ ID NO: 6347 - DNA, 23 bp, Artificial Sequence
  HLA-A targeting gRNA
gcctcacactcagtgtgtttggg

SEQ ID NO: 6348 - DNA, 23 bp, Artificial Sequence
  HLA-A targeting gRNA
gcctcctccgcgggtatgaccgg

SEQ ID NO: 6349 - DNA, 23 bp, Artificial Sequence
  HLA-A targeting gRNA
gcctcggggtggatctcagacgg

SEQ ID NO: 6350 - DNA, 23 bp, Artificial Sequence
  HLA-A targeting gRNA
gcctctatggagaggagcgaggg

SEQ ID NO: 6351 - DNA, 23 bp, Artificial Sequence
  HLA-A targeting gRNA
gcctctgccgggaggagcgaggg

SEQ ID NO: 6352 - DNA, 23 bp, Artificial Sequence
  HLA-A targeting gRNA
gcctctgcggagaggagcgaggg

SEQ ID NO: 6353 - DNA, 23 bp, Artificial Sequence
  HLA-A targeting gRNA
gcctctgcggagaggagggaggg

SEQ ID NO: 6354 - DNA, 23 bp, Artificial Sequence
  HLA-A targeting gRNA
gcctctgctgagaggagcgaggg

SEQ ID NO: 6355 - DNA, 23 bp, Artificial Sequence
  HLA-A targeting gRNA
gcctctggggagaggagcgaggg

SEQ ID NO: 6356 - DNA, 23 bp, Artificial Sequence
  HLA-A targeting gRNA
gcctctgtagggaggagcaaggg

SEQ ID NO: 6357 - DNA, 23 bp, Artificial Sequence
  HLA-A targeting gRNA
gcctctgtggggaggagagaggg

SEQ ID NO: 6358 - DNA, 23 bp, Artificial Sequence
  HLA-A targeting gRNA
gcctctgtggggaggagcgaggg

SEQ ID NO: 6359 - DNA, 23 bp, Artificial Sequence
  HLA-A targeting gRNA
gcctgagacagctgcctgtgtgg

SEQ ID NO: 6360 - DNA, 23 bp, Artificial Sequence
  HLA-A targeting gRNA
gcctgcatccgctggtgtctggg

SEQ ID NO: 6361 - DNA, 23 bp, Artificial Sequence
  HLA-A targeting gRNA
gcctgcgtccgctggtgtctggg

SEQ ID NO: 6362 - DNA, 23 bp, Artificial Sequence
  HLA-A targeting gRNA
gcctggagtagaacaaaaacagg

SEQ ID NO: 6363 - DNA, 23 bp, Artificial Sequence
  HLA-A targeting gRNA
gcctggagtagaaccaaaacagg

SEQ ID NO: 6364 - DNA, 23 bp, Artificial Sequence
  HLA-A targeting gRNA
gcctggccctgaccgagacctgg

SEQ ID NO: 6365 - DNA, 23 bp, Artificial Sequence
  HLA-A targeting gRNA
gccttgatggttgtggtgttggg

SEQ ID NO: 6366 - DNA, 23 bp, Artificial Sequence
  HLA-A targeting gRNA
gcgaccccgcgagtccgagaggg

SEQ ID NO: 6367 - DNA, 23 bp, Artificial Sequence
  HLA-A targeting gRNA
gcgaccccggccgtacgtggggg

SEQ ID NO: 6368 - DNA, 23 bp, Artificial Sequence
  HLA-A targeting gRNA
gcgacccgggccgtacgtggggg

SEQ ID NO: 6369 - DNA, 23 bp, Artificial Sequence
  HLA-A targeting gRNA
gcgacccgggccgtccgtggggg

SEQ ID NO: 6370 - DNA, 23 bp, Artificial Sequence
  HLA-A targeting gRNA
gcgacgccgcaagtccgagaggg

SEQ ID NO: 6371 - DNA, 23 bp, Artificial Sequence
  HLA-A targeting gRNA
gcgacgccgcgagtccaagaggg

SEQ ID NO: 6372 - DNA, 23 bp, Artificial Sequence
  HLA-A targeting gRNA
gcgacgccgcgagtccgagaagg

SEQ ID NO: 6373 - DNA, 23 bp, Artificial Sequence
  HLA-A targeting gRNA
gcgacgccgcgagtccgagaggg

SEQ ID NO: 6374 - DNA, 23 bp, Artificial Sequence
  HLA-A targeting gRNA
gcgacgccgcgagtccgaggggg

SEQ ID NO: 6375 - DNA, 23 bp, Artificial Sequence
  HLA-A targeting gRNA
gcgactccgcgagtccaagaggg

SEQ ID NO: 6376 - DNA, 23 bp, Artificial Sequence
  HLA-A targeting gRNA
gcgagaccggtgagtgaccccgg

SEQ ID NO: 6377 - DNA, 23 bp, Artificial Sequence
  HLA-A targeting gRNA
gcgaggaccgtgagtgaccccgg

SEQ ID NO: 6378 - DNA, 23 bp, Artificial Sequence
  HLA-A targeting gRNA
gcgaggccagtgagtgaccccgg

SEQ ID NO: 6379 - DNA, 23 bp, Artificial Sequence
  HLA-A targeting gRNA
gcgaggggcccgcccggcgaggg

SEQ ID NO: 6380 - DNA, 23 bp, Artificial Sequence
  HLA-A targeting gRNA
gcgaggggccctcccggcgaggg

SEQ ID NO: 6381 - DNA, 23 bp, Artificial Sequence
  HLA-A targeting gRNA
gcgcaagtgggaggcggcccggg

SEQ ID NO: 6382 - DNA, 23 bp, Artificial Sequence
  HLA-A targeting gRNA
gcgcagggaggagggtcgggcgg

SEQ ID NO: 6383 - DNA, 23 bp, Artificial Sequence
  HLA-A targeting gRNA
gcgcagggaggtgggtcgggcgg

SEQ ID NO: 6384 - DNA, 23 bp, Artificial Sequence
  HLA-A targeting gRNA
gcgcaggtaccaggggcagtggg

SEQ ID NO: 6385 - DNA, 23 bp, Artificial Sequence
  HLA-A targeting gRNA
gcgccatggatagagcaagaggg

SEQ ID NO: 6386 - DNA, 23 bp, Artificial Sequence
  HLA-A targeting gRNA
gcgccatggatagagcaggaggg

SEQ ID NO: 6387 - DNA, 23 bp, Artificial Sequence
  HLA-A targeting gRNA
gcgcccgcggctccccttctcgg

SEQ ID NO: 6388 - DNA, 23 bp, Artificial Sequence
  HLA-A targeting gRNA
gcgccctggatagagcaggaggg

SEQ ID NO: 6389 - DNA, 23 bp, Artificial Sequence
  HLA-A targeting gRNA
gcgccgggaggagggtctggcgg

SEQ ID NO: 6390 - DNA, 23 bp, Artificial Sequence
  HLA-A targeting gRNA
gcgccgggaggtgggtcgggcgg

SEQ ID NO: 6391 - DNA, 23 bp, Artificial Sequence
  HLA-A targeting gRNA
gcgccggtaggagggtcgggcgg

SEQ ID NO: 6392 - DNA, 23 bp, Artificial Sequence
  HLA-A targeting gRNA
gcgccgtggatagagcaagaggg

SEQ ID NO: 6393 - DNA, 23 bp, Artificial Sequence
  HLA-A targeting gRNA
gcgccgtgggtggagaaggaggg

SEQ ID NO: 6394 - DNA, 23 bp, Artificial Sequence
  HLA-A targeting gRNA
gcgccgtgggtggagcaggaggg

SEQ ID NO: 6395 - DNA, 23 bp, Artificial Sequence
  HLA-A targeting gRNA
gcgcctccccaatgcagacaagg

SEQ ID NO: 6396 - DNA, 23 bp, Artificial Sequence
  HLA-A targeting gRNA
gcgcctccccaatgcagacacgg

SEQ ID NO: 6397 - DNA, 23 bp, Artificial Sequence
  HLA-A targeting gRNA
gcgcctccccaatgcagacgcgg

SEQ ID NO: 6398 - DNA, 23 bp, Artificial Sequence
  HLA-A targeting gRNA
gcgcctccccagtgcagacacgg

SEQ ID NO: 6399 - DNA, 23 bp, Artificial Sequence
  HLA-A targeting gRNA
gcgcctccccattgcagacgcgg

SEQ ID NO: 6400 - DNA, 23 bp, Artificial Sequence
  HLA-A targeting gRNA
gcgcgatcctcaggttctctcgg

SEQ ID NO: 6401 - DNA, 23 bp, Artificial Sequence
  HLA-A targeting gRNA
gcgcgcgggtaccggggcagtgg

SEQ ID NO: 6402 - DNA, 23 bp, Artificial Sequence
  HLA-A targeting gRNA
gcgcggctacaaccagagcgagg

SEQ ID NO: 6403 - DNA, 23 bp, Artificial Sequence
  HLA-A targeting gRNA
gcgcgggtaccaagggcagtggg

SEQ ID NO: 6404 - DNA, 23 bp, Artificial Sequence
  HLA-A targeting gRNA
gcgcgggtaccaggggcagtggg

SEQ ID NO: 6405 - DNA, 23 bp, Artificial Sequence
  HLA-A targeting gRNA
gcgcgggtaccggggcagtgggg

SEQ ID NO: 6406 - DNA, 23 bp, Artificial Sequence
  HLA-A targeting gRNA
gcgcggtgcgcaggctctctcgg

SEQ ID NO: 6407 - DNA, 23 bp, Artificial Sequence
  HLA-A targeting gRNA
gcgcggtgcgcaggttctctcgg

SEQ ID NO: 6408 - DNA, 23 bp, Artificial Sequence
  HLA-A targeting gRNA
gcgcggtggatagagcaggaggg

SEQ ID NO: 6409 - DNA, 23 bp, Artificial Sequence
  HLA-A targeting gRNA
gcgctgagtgatctgagccgcgg

SEQ ID NO: 6410 - DNA, 23 bp, Artificial Sequence
  HLA-A targeting gRNA
gcgctgggtaatctgagccgcgg

SEQ ID NO: 6411 - DNA, 23 bp, Artificial Sequence
  HLA-A targeting gRNA
gcgctgggtgatctaagccgcgg

SEQ ID NO: 6412 - DNA, 23 bp, Artificial Sequence
  HLA-A targeting gRNA
gcgctgggtgatctgagccgcgg

SEQ ID NO: 6413 - DNA, 23 bp, Artificial Sequence
  HLA-A targeting gRNA
gcgctggtaccaggggcagtggg

SEQ ID NO: 6414 - DNA, 23 bp, Artificial Sequence
  HLA-A targeting gRNA
gcggaacccgcccagaccctcgg

SEQ ID NO: 6415 - DNA, 23 bp, Artificial Sequence
  HLA-A targeting gRNA
gcggatgtatggctgcgacctgg

SEQ ID NO: 6416 - DNA, 23 bp, Artificial Sequence
  HLA-A targeting gRNA
gcggccaggccgggacacggagg

SEQ ID NO: 6417 - DNA, 23 bp, Artificial Sequence
  HLA-A targeting gRNA
gcggccaggccgggacacggcgg

SEQ ID NO: 6418 - DNA, 23 bp, Artificial Sequence
  HLA-A targeting gRNA
gcggccaggccgggacatggcgg

SEQ ID NO: 6419 - DNA, 23 bp, Artificial Sequence
  HLA-A targeting gRNA
gcggccgggccaggacacggcgg

SEQ ID NO: 6420 - DNA, 23 bp, Artificial Sequence
  HLA-A targeting gRNA
gcggccgggcccggacacggcgg

SEQ ID NO: 6421 - DNA, 23 bp, Artificial Sequence
  HLA-A targeting gRNA
gcggccgggccgggacacagcgg

SEQ ID NO: 6422 - DNA, 23 bp, Artificial Sequence
  HLA-A targeting gRNA
gcggccgggccgggacacggcgg

SEQ ID NO: 6423 - DNA, 23 bp, Artificial Sequence
  HLA-A targeting gRNA
gcggccgggccgggacatagcgg

SEQ ID NO: 6424 - DNA, 23 bp, Artificial Sequence
  HLA-A targeting gRNA
gcggccgggccgggacatggcgg

SEQ ID NO: 6425 - DNA, 23 bp, Artificial Sequence
  HLA-A targeting gRNA
gcggccgggccgggacgtggcgg

SEQ ID NO: 6426 - DNA, 23 bp, Artificial Sequence
  HLA-A targeting gRNA
gcggccgggccgggtcatggcgg

SEQ ID NO: 6427 - DNA, 23 bp, Artificial Sequence
  HLA-A targeting gRNA
gcggcctcgggggcggatctcgg

SEQ ID NO: 6428 - DNA, 23 bp, Artificial Sequence
  HLA-A targeting gRNA
gcggcctggccgggacacggcgg

SEQ ID NO: 6429 - DNA, 23 bp, Artificial Sequence
  HLA-A targeting gRNA
gcggcgcagggaggagggtcggg

SEQ ID NO: 6430 - DNA, 23 bp, Artificial Sequence
  HLA-A targeting gRNA
gcggcgcagggaggtgggtcggg

SEQ ID NO: 6431 - DNA, 23 bp, Artificial Sequence
  HLA-A targeting gRNA
gcggctgggccgggacacagcgg

SEQ ID NO: 6432 - DNA, 23 bp, Artificial Sequence
  HLA-A targeting gRNA
gcgggacggggctgaccacgggg

SEQ ID NO: 6433 - DNA, 23 bp, Artificial Sequence
  HLA-A targeting gRNA
gcgggagccgtggatggagcagg

SEQ ID NO: 6434 - DNA, 23 bp, Artificial Sequence
  HLA-A targeting gRNA
gcgggagccgtgggtggagcagg

SEQ ID NO: 6435 - DNA, 23 bp, Artificial Sequence
  HLA-A targeting gRNA
gcgggcgccatggatagagcagg

SEQ ID NO: 6436 - DNA, 23 bp, Artificial Sequence
  HLA-A targeting gRNA
gcgggcgccctggatagagcagg

SEQ ID NO: 6437 - DNA, 23 bp, Artificial Sequence
  HLA-A targeting gRNA
gcgggcgccgtgggtggagaagg

SEQ ID NO: 6438 - DNA, 23 bp, Artificial Sequence
  HLA-A targeting gRNA
gcgggcgccgtgggtggagcagg

SEQ ID NO: 6439 - DNA, 23 bp, Artificial Sequence
  HLA-A targeting gRNA
gcgggcgccgtgggtggaggagg

SEQ ID NO: 6440 - DNA, 23 bp, Artificial Sequence
  HLA-A targeting gRNA
gcgggcgcggtggatagagcagg

SEQ ID NO: 6441 - DNA, 23 bp, Artificial Sequence
  HLA-A targeting gRNA
gcggggcacacttctacctgggg

SEQ ID NO: 6442 - DNA, 23 bp, Artificial Sequence
  HLA-A targeting gRNA
gcggggcggggccggggggacgg

SEQ ID NO: 6443 - DNA, 23 bp, Artificial Sequence
  HLA-A targeting gRNA
gcggggcggggcggggccggggg

SEQ ID NO: 6444 - DNA, 23 bp, Artificial Sequence
  HLA-A targeting gRNA
gcggggcggggcggggctcgggg

SEQ ID NO: 6445 - DNA, 23 bp, Artificial Sequence
  HLA-A targeting gRNA
gcggggcggggctcgggggacgg

SEQ ID NO: 6446 - DNA, 23 bp, Artificial Sequence
  HLA-A targeting gRNA
gcggggggggtggggtggggagg

SEQ ID NO: 6447 - DNA, 23 bp, Artificial Sequence
  HLA-A targeting gRNA
gcgggtcccgcggcctcaggggg

SEQ ID NO: 6448 - DNA, 23 bp, Artificial Sequence
  HLA-A targeting gRNA
gcgggtgagtgcgggtcggcagg

SEQ ID NO: 6449 - DNA, 23 bp, Artificial Sequence
  HLA-A targeting gRNA
gcgggttgggcggggcggggcgg

SEQ ID NO: 6450 - DNA, 23 bp, Artificial Sequence
  HLA-A targeting gRNA
gcgggttggtcagggcggggcgg

SEQ ID NO: 6451 - DNA, 23 bp, Artificial Sequence
  HLA-A targeting gRNA
gcgggttggtcggggcggggcgg

SEQ ID NO: 6452 - DNA, 23 bp, Artificial Sequence
  HLA-A targeting gRNA
gcgtccagcgacagtgcccaggg

SEQ ID NO: 6453 - DNA, 23 bp, Artificial Sequence
  HLA-A targeting gRNA
gcgtctccttcccattctccagg

SEQ ID NO: 6454 - DNA, 23 bp, Artificial Sequence
  HLA-A targeting gRNA
gcgtctccttcccattcttcagg

SEQ ID NO: 6455 - DNA, 23 bp, Artificial Sequence
  HLA-A targeting gRNA
gcgtctccttccctttctccagg

SEQ ID NO: 6456 - DNA, 23 bp, Artificial Sequence
  HLA-A targeting gRNA
gcgtctccttccctttcttcagg

SEQ ID NO: 6457 - DNA, 23 bp, Artificial Sequence
  HLA-A targeting gRNA
gcgtctccttccggttctccagg

SEQ ID NO: 6458 - DNA, 23 bp, Artificial Sequence
  HLA-A targeting gRNA
gcgtctccttcctgttctccagg

SEQ ID NO: 6459 - DNA, 23 bp, Artificial Sequence
  HLA-A targeting gRNA
gcgtctctgaggaaatggagggg

SEQ ID NO: 6460 - DNA, 23 bp, Artificial Sequence
  HLA-A targeting gRNA
gcgtctctttcccgttctccagg

SEQ ID NO: 6461 - DNA, 23 bp, Artificial Sequence
  HLA-A targeting gRNA
gcgtcttcttcccgttccccagg

SEQ ID NO: 6462 - DNA, 23 bp, Artificial Sequence
  HLA-A targeting gRNA
gcgtcttcttcccgttctccagg

SEQ ID NO: 6463 - DNA, 23 bp, Artificial Sequence
  HLA-A targeting gRNA
gcgtcttcttcctgttctccagg

SEQ ID NO: 6464 - DNA, 23 bp, Artificial Sequence
  HLA-A targeting gRNA
gcgtgtccttcccgttctccagg

SEQ ID NO: 6465 - DNA, 23 bp, Artificial Sequence
  HLA-A targeting gRNA
gctaaggacagaccttaggaggg

SEQ ID NO: 6466 - DNA, 23 bp, Artificial Sequence
  HLA-A targeting gRNA
gctacgccgcgagtccaagaggg

SEQ ID NO: 6467 - DNA, 23 bp, Artificial Sequence
  HLA-A targeting gRNA
gctatgtcccggcccggccgcgg

SEQ ID NO: 6468 - DNA, 23 bp, Artificial Sequence
  HLA-A targeting gRNA
gctcaggtagggaaggggtgagg

SEQ ID NO: 6469 - DNA, 23 bp, Artificial Sequence
  HLA-A targeting gRNA
gctcaggtagggaaggggtgggg

SEQ ID NO: 6470 - DNA, 23 bp, Artificial Sequence
  HLA-A targeting gRNA
gctcccctctcggactcgcgggg

SEQ ID NO: 6471 - DNA, 23 bp, Artificial Sequence
  HLA-A targeting gRNA
gctccctccttttccacctgtgg

SEQ ID NO: 6472 - DNA, 23 bp, Artificial Sequence
  HLA-A targeting gRNA
gctctcgccggtcgagggtctgg

SEQ ID NO: 6473 - DNA, 23 bp, Artificial Sequence
  HLA-A targeting gRNA
gctctcgccggtcgagggtttgg

SEQ ID NO: 6474 - DNA, 23 bp, Artificial Sequence
  HLA-A targeting gRNA
gctctctccggccgagggtctgg

SEQ ID NO: 6475 - DNA, 23 bp, Artificial Sequence
  HLA-A targeting gRNA
gctctctccggtcgagggtctgg

SEQ ID NO: 6476 - DNA, 23 bp, Artificial Sequence
  HLA-A targeting gRNA
gctctctgcggtcgaggttctgg

SEQ ID NO: 6477 - DNA, 23 bp, Artificial Sequence
  HLA-A targeting gRNA
gctctgaccaggtcctgttttgg

SEQ ID NO: 6478 - DNA, 23 bp, Artificial Sequence
  HLA-A targeting gRNA
gctgaagaactcagaaaagctgg

SEQ ID NO: 6479 - DNA, 23 bp, Artificial Sequence
  HLA-A targeting gRNA
gctgcaacctggggcccgacggg

SEQ ID NO: 6480 - DNA, 23 bp, Artificial Sequence
  HLA-A targeting gRNA
gctgcaacgcgcgggtaccaggg

SEQ ID NO: 6481 - DNA, 23 bp, Artificial Sequence
  HLA-A targeting gRNA
gctgcagagcgcgggtaccaggg

SEQ ID NO: 6482 - DNA, 23 bp, Artificial Sequence
  HLA-A targeting gRNA
gctgcagcacgcgggtaccaggg

SEQ ID NO: 6483 - DNA, 23 bp, Artificial Sequence
  HLA-A targeting gRNA
gctgcagcgcgcaggtaccaggg

SEQ ID NO: 6484 - DNA, 23 bp, Artificial Sequence
  HLA-A targeting gRNA
gctgcagcgcgcgggtaccaagg

SEQ ID NO: 6485 - DNA, 23 bp, Artificial Sequence
  HLA-A targeting gRNA
gctgcagcgcgcgggtaccgggg

SEQ ID NO: 6486 - DNA, 23 bp, Artificial Sequence
  HLA-A targeting gRNA
gctgcaggactcagaaaagctgg

SEQ ID NO: 6487 - DNA, 23 bp, Artificial Sequence
  HLA-A targeting gRNA
gctgcgacatggggccggacggg

SEQ ID NO: 6488 - DNA, 23 bp, Artificial Sequence
  HLA-A targeting gRNA
gctgcgacccggggcccgacggg

SEQ ID NO: 6489 - DNA, 23 bp, Artificial Sequence
  HLA-A targeting gRNA
gctgcgacctggggccccacggg

SEQ ID NO: 6490 - DNA, 23 bp, Artificial Sequence
  HLA-A targeting gRNA
gctgcgacctggggcccgaccgg

SEQ ID NO: 6491 - DNA, 23 bp, Artificial Sequence
  HLA-A targeting gRNA
gctgcgacctggggcccgacggg

SEQ ID NO: 6492 - DNA, 23 bp, Artificial Sequence
  HLA-A targeting gRNA
gctgcgacctggggccctacggg

SEQ ID NO: 6493 - DNA, 23 bp, Artificial Sequence
  HLA-A targeting gRNA
gctgcgacctggggccggacggg

SEQ ID NO: 6494 - DNA, 23 bp, Artificial Sequence
  HLA-A targeting gRNA
gctgcgacctggggctcgacggg

SEQ ID NO: 6495 - DNA, 23 bp, Artificial Sequence
  HLA-A targeting gRNA
gctgcgacctgggtcccgacggg

SEQ ID NO: 6496 - DNA, 23 bp, Artificial Sequence
  HLA-A targeting gRNA
gctgcgaccttgggcccgacggg

SEQ ID NO: 6497 - DNA, 23 bp, Artificial Sequence
  HLA-A targeting gRNA
gctgcgacgtggagccggacggg

SEQ ID NO: 6498 - DNA, 23 bp, Artificial Sequence
  HLA-A targeting gRNA
gctgcgacgtggggcccgacggg

SEQ ID NO: 6499 - DNA, 23 bp, Artificial Sequence
  HLA-A targeting gRNA
gctgcgacgtggggcccggcggg

SEQ ID NO: 6500 - DNA, 23 bp, Artificial Sequence
  HLA-A targeting gRNA
gctgcgacgtggggccggatggg

SEQ ID NO: 6501 - DNA, 23 bp, Artificial Sequence
  HLA-A targeting gRNA
gctggagcgcgcgggtaccaggg

SEQ ID NO: 6502 - DNA, 23 bp, Artificial Sequence
  HLA-A targeting gRNA
gctggagcgcgctggtaccaggg

SEQ ID NO: 6503 - DNA, 23 bp, Artificial Sequence
  HLA-A targeting gRNA
gctgggacctggggcccgacggg

SEQ ID NO: 6504 - DNA, 23 bp, Artificial Sequence
  HLA-A targeting gRNA
gctggggtaaggaggggaatggg

SEQ ID NO: 6505 - DNA, 23 bp, Artificial Sequence
  HLA-A targeting gRNA
gctgggtcagggctgaggcttgg

SEQ ID NO: 6506 - DNA, 23 bp, Artificial Sequence
  HLA-A targeting gRNA
gctgtcgaacctcacgaactggg

SEQ ID NO: 6507 - DNA, 23 bp, Artificial Sequence
  HLA-A targeting gRNA
gctgtgtcccggcccagccgcgg

SEQ ID NO: 6508 - DNA, 23 bp, Artificial Sequence
  HLA-A targeting gRNA
gctgtgtcccggcccggccgcgg

SEQ ID NO: 6509 - DNA, 23 bp, Artificial Sequence
  HLA-A targeting gRNA
gcttgaaaaggtgagattcttgg

SEQ ID NO: 6510 - DNA, 23 bp, Artificial Sequence
  HLA-A targeting gRNA
gcttgtaaaggtgagattctggg

SEQ ID NO: 6511 - DNA, 23 bp, Artificial Sequence
  HLA-A targeting gRNA
gcttgtaaggtgagattctgggg

SEQ ID NO: 6512 - DNA, 23 bp, Artificial Sequence
  HLA-A targeting gRNA
gcttgtacggctgcgacgtgggg

SEQ ID NO: 6513 - DNA, 23 bp, Artificial Sequence
  HLA-A targeting gRNA
gcttgtacttctgcgtctcccgg

SEQ ID NO: 6514 - DNA, 23 bp, Artificial Sequence
  HLA-A targeting gRNA
gcttgtacttctgtgtctcccgg

SEQ ID NO: 6515 - DNA, 23 bp, Artificial Sequence
  HLA-A targeting gRNA
gcttgtacttttgtgtctcccgg

SEQ ID NO: 6516 - DNA, 23 bp, Artificial Sequence
  HLA-A targeting gRNA
gcttgtagttctgtgtctcccgg

SEQ ID NO: 6517 - DNA, 23 bp, Artificial Sequence
  HLA-A targeting gRNA
gcttgtccttcccgttctccagg

SEQ ID NO: 6518 - DNA, 23 bp, Artificial Sequence
  HLA-A targeting gRNA
gcttgtgcttctgtgtctcccgg

SEQ ID NO: 6519 - DNA, 23 bp, Artificial Sequence
  HLA-A targeting gRNA
gcttgttcttctgtgtctcccgg

SEQ ID NO: 6520 - DNA, 23 bp, Artificial Sequence
  HLA-A targeting gRNA
ggaaaagaggagaaggtgagggg

SEQ ID NO: 6521 - DNA, 23 bp, Artificial Sequence
  HLA-A targeting gRNA
ggaaaggaagggaagatgagggg

SEQ ID NO: 6522 - DNA, 23 bp, Artificial Sequence
  HLA-A targeting gRNA
ggaaaggaggagaaggtgagggg

SEQ ID NO: 6523 - DNA, 23 bp, Artificial Sequence
  HLA-A targeting gRNA
ggaaaggaggggaagacgagggg

SEQ ID NO: 6524 - DNA, 23 bp, Artificial Sequence
  HLA-A targeting gRNA
ggaaaggaggggaagatgagggg

SEQ ID NO: 6525 - DNA, 23 bp, Artificial Sequence
  HLA-A targeting gRNA
ggaaaggaggggaaggtgagggg

SEQ ID NO: 6526 - DNA, 23 bp, Artificial Sequence
  HLA-A targeting gRNA
ggaaagttcgagtctctgagcgg

SEQ ID NO: 6527 - DNA, 23 bp, Artificial Sequence
  HLA-A targeting gRNA
ggaaagttcgagtctctgagtgg

SEQ ID NO: 6528 - DNA, 23 bp, Artificial Sequence
  HLA-A targeting gRNA
ggaaccgtgactttcctctcagg

SEQ ID NO: 6529 - DNA, 23 bp, Artificial Sequence
  HLA-A targeting gRNA
ggaacgcagatcctcgttcaggg

SEQ ID NO: 6530 - DNA, 23 bp, Artificial Sequence
  HLA-A targeting gRNA
ggaagaaaatgccctatgagggg

SEQ ID NO: 6531 - DNA, 23 bp, Artificial Sequence
  HLA-A targeting gRNA
ggaagaaaatgccctgtgagggg

SEQ ID NO: 6532 - DNA, 23 bp, Artificial Sequence
  HLA-A targeting gRNA
ggaagaaaatgtcctgtgagggg

SEQ ID NO: 6533 - DNA, 23 bp, Artificial Sequence
  HLA-A targeting gRNA
ggaagaagaagtgaaactcaggg

SEQ ID NO: 6534 - DNA, 23 bp, Artificial Sequence
  HLA-A targeting gRNA
ggaagaaggaccccacaagttgg

SEQ ID NO: 6535 - DNA, 23 bp, Artificial Sequence
  HLA-A targeting gRNA
ggaagagctcaggtagggaaggg

SEQ ID NO: 6536 - DNA, 23 bp, Artificial Sequence
  HLA-A targeting gRNA
ggaagagttcaggtagggaaggg

SEQ ID NO: 6537 - DNA, 23 bp, Artificial Sequence
  HLA-A targeting gRNA
ggaagagttctggtagggaaggg

SEQ ID NO: 6538 - DNA, 23 bp, Artificial Sequence
  HLA-A targeting gRNA
ggaagatggctcccatctcaggg

SEQ ID NO: 6539 - DNA, 23 bp, Artificial Sequence
  HLA-A targeting gRNA
ggaagcctgggggcgaggagggg

SEQ ID NO: 6540 - DNA, 23 bp, Artificial Sequence
  HLA-A targeting gRNA
ggaagcgcccgtcgggccccagg

SEQ ID NO: 6541 - DNA, 23 bp, Artificial Sequence
  HLA-A targeting gRNA
ggaaggagccgcgggcgccatgg

SEQ ID NO: 6542 - DNA, 23 bp, Artificial Sequence
  HLA-A targeting gRNA
ggaaggagccgcgggcgccctgg

SEQ ID NO: 6543 - DNA, 23 bp, Artificial Sequence
  HLA-A targeting gRNA
ggaaggagccgcgggcgccgtgg

SEQ ID NO: 6544 - DNA, 23 bp, Artificial Sequence
  HLA-A targeting gRNA
ggaaggctccccactgcccctgg

SEQ ID NO: 6545 - DNA, 23 bp, Artificial Sequence
  HLA-A targeting gRNA
ggaaggctccccactgcccttgg

SEQ ID NO: 6546 - DNA, 23 bp, Artificial Sequence
  HLA-A targeting gRNA
ggacaagaggaattatggggcgg

SEQ ID NO: 6547 - DNA, 23 bp, Artificial Sequence
  HLA-A targeting gRNA
ggacaagaggaattatggggtgg

SEQ ID NO: 6548 - DNA, 23 bp, Artificial Sequence
  HLA-A targeting gRNA
ggacacctgatcagtattctagg

SEQ ID NO: 6549 - DNA, 23 bp, Artificial Sequence
  HLA-A targeting gRNA
ggacacctggggtagggaagggg

SEQ ID NO: 6550 - DNA, 23 bp, Artificial Sequence
  HLA-A targeting gRNA
ggacacctggggtggggaagggg

SEQ ID NO: 6551 - DNA, 23 bp, Artificial Sequence
  HLA-A targeting gRNA
ggacacctggtgtggggaagggg

SEQ ID NO: 6552 - DNA, 23 bp, Artificial Sequence
  HLA-A targeting gRNA
ggacagatgtatcgccttgatgg

SEQ ID NO: 6553 - DNA, 23 bp, Artificial Sequence
  HLA-A targeting gRNA
ggacaggaggaattagggggtgg

SEQ ID NO: 6554 - DNA, 23 bp, Artificial Sequence
  HLA-A targeting gRNA
ggacaggaggaattatggggtgg

SEQ ID NO: 6555 - DNA, 23 bp, Artificial Sequence
  HLA-A targeting gRNA
ggacatttgcttcccacaggtgg

SEQ ID NO: 6556 - DNA, 23 bp, Artificial Sequence
  HLA-A targeting gRNA
ggacattttcttcccacaggtgg

SEQ ID NO: 6557 - DNA, 23 bp, Artificial Sequence
  HLA-A targeting gRNA
ggacccctgatcactatcctagg

SEQ ID NO: 6558 - DNA, 23 bp, Artificial Sequence
  HLA-A targeting gRNA
ggacccctgatcagtattatagg

SEQ ID NO: 6559 - DNA, 23 bp, Artificial Sequence
  HLA-A targeting gRNA
ggacccctgatcagtattccagg

SEQ ID NO: 6560 - DNA, 23 bp, Artificial Sequence
  HLA-A targeting gRNA
ggacccctgatcagtattctagg

SEQ ID NO: 6561 - DNA, 23 bp, Artificial Sequence
  HLA-A targeting gRNA
ggaccggtgagtgcggggttggg

SEQ ID NO: 6562 - DNA, 23 bp, Artificial Sequence
  HLA-A targeting gRNA
ggacctaagctcctggaccgcgg

SEQ ID NO: 6563 - DNA, 23 bp, Artificial Sequence
  HLA-A targeting gRNA
ggacctgagctcccggaccgcgg

SEQ ID NO: 6564 - DNA, 23 bp, Artificial Sequence
  HLA-A targeting gRNA
ggacctgagctcctggaccgcgg

SEQ ID NO: 6565 - DNA, 23 bp, Artificial Sequence
  HLA-A targeting gRNA
ggacctgagctcctggatcgcgg

SEQ ID NO: 6566 - DNA, 23 bp, Artificial Sequence
  HLA-A targeting gRNA
ggacctggtcaagagcccgcagg

SEQ ID NO: 6567 - DNA, 23 bp, Artificial Sequence
  HLA-A targeting gRNA
ggacggagccccgggagccatgg

SEQ ID NO: 6568 - DNA, 23 bp, Artificial Sequence
  HLA-A targeting gRNA
ggacggagccccgggcgccatgg

SEQ ID NO: 6569 - DNA, 23 bp, Artificial Sequence
  HLA-A targeting gRNA
ggacggagccccgggcgccgtgg

SEQ ID NO: 6570 - DNA, 23 bp, Artificial Sequence
  HLA-A targeting gRNA
ggacggagccctgggcgccatgg

SEQ ID NO: 6571 - DNA, 23 bp, Artificial Sequence
  HLA-A targeting gRNA
ggacggatgtatcaccgtggtgg

SEQ ID NO: 6572 - DNA, 23 bp, Artificial Sequence
  HLA-A targeting gRNA
ggacggatgtatcacctcgatgg

SEQ ID NO: 6573 - DNA, 23 bp, Artificial Sequence
  HLA-A targeting gRNA
ggacggatgtatcaccttgatgg

SEQ ID NO: 6574 - DNA, 23 bp, Artificial Sequence
  HLA-A targeting gRNA
ggacggatgtatcaccttggtgg

SEQ ID NO: 6575 - DNA, 23 bp, Artificial Sequence
  HLA-A targeting gRNA
ggacggatgtatcgccttgatgg

SEQ ID NO: 6576 - DNA, 23 bp, Artificial Sequence
  HLA-A targeting gRNA
ggacgggctgaccacgggggcgg

SEQ ID NO: 6577 - DNA, 23 bp, Artificial Sequence
  HLA-A targeting gRNA
ggacgtttcgagtgtgtggtggg

SEQ ID NO: 6578 - DNA, 23 bp, Artificial Sequence
  HLA-A targeting gRNA
ggactcccgagagcagcaggagg

SEQ ID NO: 6579 - DNA, 23 bp, Artificial Sequence
  HLA-A targeting gRNA
ggactctccgcggccgggccggg

SEQ ID NO: 6580 - DNA, 23 bp, Artificial Sequence
  HLA-A targeting gRNA
ggacttcagaaccgggactgcgg

SEQ ID NO: 6581 - DNA, 23 bp, Artificial Sequence
  HLA-A targeting gRNA
ggacttcagaaccggtactgcgg

SEQ ID NO: 6582 - DNA, 23 bp, Artificial Sequence
  HLA-A targeting gRNA
ggactttagaaccgggactgcgg

SEQ ID NO: 6583 - DNA, 23 bp, Artificial Sequence
  HLA-A targeting gRNA
ggactttagaacctggactgcgg

SEQ ID NO: 6584 - DNA, 23 bp, Artificial Sequence
  HLA-A targeting gRNA
ggactttagaactgggaccacgg

SEQ ID NO: 6585 - DNA, 23 bp, Artificial Sequence
  HLA-A targeting gRNA
ggactttagaactgggaccccgg

SEQ ID NO: 6586 - DNA, 23 bp, Artificial Sequence
  HLA-A targeting gRNA
ggactttagaactgggaccgcgg

SEQ ID NO: 6587 - DNA, 23 bp, Artificial Sequence
  HLA-A targeting gRNA
ggagaaacacctcatggagtggg

SEQ ID NO: 6588 - DNA, 23 bp, Artificial Sequence
  HLA-A targeting gRNA
ggagaaatacgtcatggagtggg

SEQ ID NO: 6589 - DNA, 23 bp, Artificial Sequence
  HLA-A targeting gRNA
ggagaacgggaaggacaagctgg

SEQ ID NO: 6590 - DNA, 23 bp, Artificial Sequence
  HLA-A targeting gRNA
ggagaacgggaaggacacgctgg

SEQ ID NO: 6591 - DNA, 23 bp, Artificial Sequence
  HLA-A targeting gRNA
ggagaacgggaaggagacgctgg

SEQ ID NO: 6592 - DNA, 23 bp, Artificial Sequence
  HLA-A targeting gRNA
ggagaagaagtgaaactcagggg

SEQ ID NO: 6593 - DNA, 23 bp, Artificial Sequence
  HLA-A targeting gRNA
ggagaagaagtgaaactcgtggg

SEQ ID NO: 6594 - DNA, 23 bp, Artificial Sequence
  HLA-A targeting gRNA
ggagaagaagtgaaactcttggg

SEQ ID NO: 6595 - DNA, 23 bp, Artificial Sequence
  HLA-A targeting gRNA
ggagacccgggccgtacgtcggg

SEQ ID NO: 6596 - DNA, 23 bp, Artificial Sequence
  HLA-A targeting gRNA
ggagacgcccgtcgggccccagg

SEQ ID NO: 6597 - DNA, 23 bp, Artificial Sequence
  HLA-A targeting gRNA
ggagagaggggaccgcaggcggg

SEQ ID NO: 6598 - DNA, 23 bp, Artificial Sequence
  HLA-A targeting gRNA
ggagagggagcctgggggcgagg

SEQ ID NO: 6599 - DNA, 23 bp, Artificial Sequence
  HLA-A targeting gRNA
ggagcaacggagagcctacctgg

SEQ ID NO: 6600 - DNA, 23 bp, Artificial Sequence
  HLA-A targeting gRNA
ggagcaaggggaccgcaggcggg

SEQ ID NO: 6601 - DNA, 23 bp, Artificial Sequence
  HLA-A targeting gRNA
ggagcagcggagaacctacctgg

SEQ ID NO: 6602 - DNA, 23 bp, Artificial Sequence
  HLA-A targeting gRNA
ggagcagcggagagcctacctgg

SEQ ID NO: 6603 - DNA, 23 bp, Artificial Sequence
  HLA-A targeting gRNA
ggagcagctaagagcctacctgg

SEQ ID NO: 6604 - DNA, 23 bp, Artificial Sequence
  HLA-A targeting gRNA
ggagcagctgagaacctacctgg

SEQ ID NO: 6605 - DNA, 23 bp, Artificial Sequence
  HLA-A targeting gRNA
ggagcagctgagagcctaccggg

SEQ ID NO: 6606 - DNA, 23 bp, Artificial Sequence
  HLA-A targeting gRNA
ggagcagctgagagcctgcctgg

SEQ ID NO: 6607 - DNA, 23 bp, Artificial Sequence
  HLA-A targeting gRNA
ggagcaggacagagcctacctgg

SEQ ID NO: 6608 - DNA, 23 bp, Artificial Sequence
  HLA-A targeting gRNA
ggagcagtgcagagcctacctgg

SEQ ID NO: 6609 - DNA, 23 bp, Artificial Sequence
  HLA-A targeting gRNA
ggagcagtggagagcccacctgg

SEQ ID NO: 6610 - DNA, 23 bp, Artificial Sequence
  HLA-A targeting gRNA
ggagcagtggagagtctacctgg

SEQ ID NO: 6611 - DNA, 23 bp, Artificial Sequence
  HLA-A targeting gRNA
ggagccatggatagagcaggagg

SEQ ID NO: 6612 - DNA, 23 bp, Artificial Sequence
  HLA-A targeting gRNA
ggagccccacttcatcgcagtgg

SEQ ID NO: 6613 - DNA, 23 bp, Artificial Sequence
  HLA-A targeting gRNA
ggagccccgcttcatcaccgtgg

SEQ ID NO: 6614 - DNA, 23 bp, Artificial Sequence
  HLA-A targeting gRNA
ggagccccgcttcatctcagtgg

SEQ ID NO: 6615 - DNA, 23 bp, Artificial Sequence
  HLA-A targeting gRNA
ggagccccgcttcattaccgtgg

SEQ ID NO: 6616 - DNA, 23 bp, Artificial Sequence
  HLA-A targeting gRNA
ggagccccgcttcattgcagtgg

SEQ ID NO: 6617 - DNA, 23 bp, Artificial Sequence
  HLA-A targeting gRNA
ggagccccgggcgccgtgggtgg

SEQ ID NO: 6618 - DNA, 23 bp, Artificial Sequence
  HLA-A targeting gRNA
ggagcccctcaccctgagatggg

SEQ ID NO: 6619 - DNA, 23 bp, Artificial Sequence
  HLA-A targeting gRNA
ggagcccttcagcagggtcaggg

SEQ ID NO: 6620 - DNA, 23 bp, Artificial Sequence
  HLA-A targeting gRNA
ggagcccttcagcagggtcgggg

SEQ ID NO: 6621 - DNA, 23 bp, Artificial Sequence
  HLA-A targeting gRNA
ggagcccttcagccaggtcaggg

SEQ ID NO: 6622 - DNA, 23 bp, Artificial Sequence
  HLA-A targeting gRNA
ggagcccttcagccgggtcaggg

SEQ ID NO: 6623 - DNA, 23 bp, Artificial Sequence
  HLA-A targeting gRNA
ggagcccttcagctgggtcaggg

SEQ ID NO: 6624 - DNA, 23 bp, Artificial Sequence
  HLA-A targeting gRNA
ggagccgcaggcgccgtgggtgg

SEQ ID NO: 6625 - DNA, 23 bp, Artificial Sequence
  HLA-A targeting gRNA
ggagccgcgggagccgtggatgg

SEQ ID NO: 6626 - DNA, 23 bp, Artificial Sequence
  HLA-A targeting gRNA
ggagccgcgggagccgtgggtgg

SEQ ID NO: 6627 - DNA, 23 bp, Artificial Sequence
  HLA-A targeting gRNA
ggagccgcgggcgccgtgggtgg

SEQ ID NO: 6628 - DNA, 23 bp, Artificial Sequence
  HLA-A targeting gRNA
ggagccgtggatggagcaggagg

SEQ ID NO: 6629 - DNA, 23 bp, Artificial Sequence
  HLA-A targeting gRNA
ggagccgtgggtggagcaggagg

SEQ ID NO: 6630 - DNA, 23 bp, Artificial Sequence
  HLA-A targeting gRNA
ggagcgaggggaccgcaggcggg

SEQ ID NO: 6631 - DNA, 23 bp, Artificial Sequence
  HLA-A targeting gRNA
ggagcgcagatcctcgttcaggg

SEQ ID NO: 6632 - DNA, 23 bp, Artificial Sequence
  HLA-A targeting gRNA
ggagcgcaggtcctcattcaggg

SEQ ID NO: 6633 - DNA, 23 bp, Artificial Sequence
  HLA-A targeting gRNA
ggagcgcaggtcctcgtccaggg

SEQ ID NO: 6634 - DNA, 23 bp, Artificial Sequence
  HLA-A targeting gRNA
ggagcgcaggtcctcgttcacgg

SEQ ID NO: 6635 - DNA, 23 bp, Artificial Sequence
  HLA-A targeting gRNA
ggagcgcaggtcctcgttctggg

SEQ ID NO: 6636 - DNA, 23 bp, Artificial Sequence
  HLA-A targeting gRNA
ggagctcaggtcctcgttcaagg

SEQ ID NO: 6637 - DNA, 23 bp, Artificial Sequence
  HLA-A targeting gRNA
ggagctcaggtcctcgttcaggg

SEQ ID NO: 6638 - DNA, 23 bp, Artificial Sequence
  HLA-A targeting gRNA
ggagctccgcttcatcgcagtgg

SEQ ID NO: 6639 - DNA, 23 bp, Artificial Sequence
  HLA-A targeting gRNA
ggagctgaagtggtcgggggtgg

SEQ ID NO: 6640 - DNA, 23 bp, Artificial Sequence
  HLA-A targeting gRNA
ggagctgaagtggtctggggtgg

SEQ ID NO: 6641 - DNA, 23 bp, Artificial Sequence
  HLA-A targeting gRNA
ggagcttaggtcctcgttcaggg

SEQ ID NO: 6642 - DNA, 23 bp, Artificial Sequence
  HLA-A targeting gRNA
ggaggaggggccggagtattggg

SEQ ID NO: 6643 - DNA, 23 bp, Artificial Sequence
  HLA-A targeting gRNA
ggaggcgcccgtagggccccagg

SEQ ID NO: 6644 - DNA, 23 bp, Artificial Sequence
  HLA-A targeting gRNA
ggaggcgcccgtccggccccagg

SEQ ID NO: 6645 - DNA, 23 bp, Artificial Sequence
  HLA-A targeting gRNA
ggaggcgcccgtcgagccccagg

SEQ ID NO: 6646 - DNA, 23 bp, Artificial Sequence
  HLA-A targeting gRNA
ggaggcgcccgtcgggacccagg

SEQ ID NO: 6647 - DNA, 23 bp, Artificial Sequence
  HLA-A targeting gRNA
ggaggcgcccgtcgggcccaagg

SEQ ID NO: 6648 - DNA, 23 bp, Artificial Sequence
  HLA-A targeting gRNA
ggaggcgcccgtcgggccccagg

SEQ ID NO: 6649 - DNA, 23 bp, Artificial Sequence
  HLA-A targeting gRNA
ggaggcgcccgtcgggccccggg

SEQ ID NO: 6650 - DNA, 23 bp, Artificial Sequence
  HLA-A targeting gRNA
ggaggcgcccgtggggccccagg

SEQ ID NO: 6651 - DNA, 23 bp, Artificial Sequence
  HLA-A targeting gRNA
ggaggcgccggtcgggccccagg

SEQ ID NO: 6652 - DNA, 23 bp, Artificial Sequence
  HLA-A targeting gRNA
ggagggaaatggcctctgccggg

SEQ ID NO: 6653 - DNA, 23 bp, Artificial Sequence
  HLA-A targeting gRNA
ggagggaaatggcctctgtgggg

SEQ ID NO: 6654 - DNA, 23 bp, Artificial Sequence
  HLA-A targeting gRNA
ggagggcaggtcctcgttcaggg

SEQ ID NO: 6655 - DNA, 23 bp, Artificial Sequence
  HLA-A targeting gRNA
ggaggggcccgtcgggccccagg

SEQ ID NO: 6656 - DNA, 23 bp, Artificial Sequence
  HLA-A targeting gRNA
ggaggggccggacggagtattgg

SEQ ID NO: 6657 - DNA, 23 bp, Artificial Sequence
  HLA-A targeting gRNA
ggaggtgtggaaatacctcatgg

SEQ ID NO: 6658 - DNA, 23 bp, Artificial Sequence
  HLA-A targeting gRNA
ggagtaaggagggggatgagggg

SEQ ID NO: 6659 - DNA, 23 bp, Artificial Sequence
  HLA-A targeting gRNA
ggagtcgctccgcagatacctgg

SEQ ID NO: 6660 - DNA, 23 bp, Artificial Sequence
  HLA-A targeting gRNA
ggagtcgtgacctgcgccccagg

SEQ ID NO: 6661 - DNA, 23 bp, Artificial Sequence
  HLA-A targeting gRNA
ggagtcgtgacctgcgccccggg

SEQ ID NO: 6662 - DNA, 23 bp, Artificial Sequence
  HLA-A targeting gRNA
ggagtggaagcctgggggcgagg

SEQ ID NO: 6663 - DNA, 23 bp, Artificial Sequence
  HLA-A targeting gRNA
ggagtggagaatccccaacgcgg

SEQ ID NO: 6664 - DNA, 23 bp, Artificial Sequence
  HLA-A targeting gRNA
ggagtggagaatcctcaacgcgg

SEQ ID NO: 6665 - DNA, 23 bp, Artificial Sequence
  HLA-A targeting gRNA
ggagtggctccgcagatatctgg

SEQ ID NO: 6666 - DNA, 23 bp, Artificial Sequence
  HLA-A targeting gRNA
ggagtggctccgcggatacctgg

SEQ ID NO: 6667 - DNA, 23 bp, Artificial Sequence
  HLA-A targeting gRNA
ggagtgggaacctgggggcgagg

SEQ ID NO: 6668 - DNA, 23 bp, Artificial Sequence
  HLA-A targeting gRNA
ggagtgggagactgggggcgagg

SEQ ID NO: 6669 - DNA, 23 bp, Artificial Sequence
  HLA-A targeting gRNA
ggagtgggagactgggggtgagg

SEQ ID NO: 6670 - DNA, 23 bp, Artificial Sequence
  HLA-A targeting gRNA
ggagtgggagcctgggagcgagg

SEQ ID NO: 6671 - DNA, 23 bp, Artificial Sequence
  HLA-A targeting gRNA
ggagtgggagcctgggggagagg

SEQ ID NO: 6672 - DNA, 23 bp, Artificial Sequence
  HLA-A targeting gRNA
ggagtgggagcctgggggccagg

SEQ ID NO: 6673 - DNA, 23 bp, Artificial Sequence
  HLA-A targeting gRNA
ggagtgggagcctgggggtgagg

SEQ ID NO: 6674 - DNA, 23 bp, Artificial Sequence
  HLA-A targeting gRNA
ggagtgggaggctgggggcgagg

SEQ ID NO: 6675 - DNA, 23 bp, Artificial Sequence
  HLA-A targeting gRNA
ggatctcagacccggagactcgg

SEQ ID NO: 6676 - DNA, 23 bp, Artificial Sequence
  HLA-A targeting gRNA
ggatctcagaccgggagactcgg

SEQ ID NO: 6677 - DNA, 23 bp, Artificial Sequence
  HLA-A targeting gRNA
ggatctcagaccgggagacttgg

SEQ ID NO: 6678 - DNA, 23 bp, Artificial Sequence
  HLA-A targeting gRNA
ggatctcagacggggagactcgg

SEQ ID NO: 6679 - DNA, 23 bp, Artificial Sequence
  HLA-A targeting gRNA
ggatctcggacccggagactcgg

SEQ ID NO: 6680 - DNA, 23 bp, Artificial Sequence
  HLA-A targeting gRNA
ggatctcggaccctgagactcgg

SEQ ID NO: 6681 - DNA, 23 bp, Artificial Sequence
  HLA-A targeting gRNA
ggatgaagtccctgaggaaatgg

SEQ ID NO: 6682 - DNA, 23 bp, Artificial Sequence
  HLA-A targeting gRNA
ggatgaagtccttgaggaaatgg

SEQ ID NO: 6683 - DNA, 23 bp, Artificial Sequence
  HLA-A targeting gRNA
ggatgaagtctctgaggaaatgg

SEQ ID NO: 6684 - DNA, 23 bp, Artificial Sequence
  HLA-A targeting gRNA
ggatgacatcgccctgaacgagg

SEQ ID NO: 6685 - DNA, 23 bp, Artificial Sequence
  HLA-A targeting gRNA
ggatgacatctctgaggaaatgg

SEQ ID NO: 6686 - DNA, 23 bp, Artificial Sequence
  HLA-A targeting gRNA
ggatgacgtctctgaggaaatgg

SEQ ID NO: 6687 - DNA, 23 bp, Artificial Sequence
  HLA-A targeting gRNA
ggatggagccccgggcgccatgg

SEQ ID NO: 6688 - DNA, 23 bp, Artificial Sequence
  HLA-A targeting gRNA
ggatggatgtatcaccttgatgg

SEQ ID NO: 6689 - DNA, 23 bp, Artificial Sequence
  HLA-A targeting gRNA
ggatggcaaggaccaaactcagg

SEQ ID NO: 6690 - DNA, 23 bp, Artificial Sequence
  HLA-A targeting gRNA
ggatggcctcccacgagaagagg

SEQ ID NO: 6691 - DNA, 23 bp, Artificial Sequence
  HLA-A targeting gRNA
ggatggcctcccacgaggaaggg

SEQ ID NO: 6692 - DNA, 23 bp, Artificial Sequence
  HLA-A targeting gRNA
ggatggcctcccacgaggagggg

SEQ ID NO: 6693 - DNA, 23 bp, Artificial Sequence
  HLA-A targeting gRNA
ggatggccttccacgaggagggg

SEQ ID NO: 6694 - DNA, 23 bp, Artificial Sequence
  HLA-A targeting gRNA
ggatggcgaggaccaaactcagg

SEQ ID NO: 6695 - DNA, 23 bp, Artificial Sequence
  HLA-A targeting gRNA
ggatggcgaggactaaactcagg

SEQ ID NO: 6696 - DNA, 23 bp, Artificial Sequence
  HLA-A targeting gRNA
ggatggcgccccgggcgccatgg

SEQ ID NO: 6697 - DNA, 23 bp, Artificial Sequence
  HLA-A targeting gRNA
ggatggcgccctgggcgccatgg

SEQ ID NO: 6698 - DNA, 23 bp, Artificial Sequence
  HLA-A targeting gRNA
ggatggcgtctctgaggaaatgg

SEQ ID NO: 6699 - DNA, 23 bp, Artificial Sequence
  HLA-A targeting gRNA
ggatggggaagaccagacccagg

SEQ ID NO: 6700 - DNA, 23 bp, Artificial Sequence
  HLA-A targeting gRNA
ggatggggaggaccaaactcagg

SEQ ID NO: 6701 - DNA, 23 bp, Artificial Sequence
  HLA-A targeting gRNA
ggatggggaggaccaaattcagg

SEQ ID NO: 6702 - DNA, 23 bp, Artificial Sequence
  HLA-A targeting gRNA
ggatggtgcttccagtaacaagg

SEQ ID NO: 6703 - DNA, 23 bp, Artificial Sequence
  HLA-A targeting gRNA
ggatggtgcttccagtaacgagg

SEQ ID NO: 6704 - DNA, 23 bp, Artificial Sequence
  HLA-A targeting gRNA
ggatgtaaggctgcgacgtgggg

SEQ ID NO: 6705 - DNA, 23 bp, Artificial Sequence
  HLA-A targeting gRNA
ggatgtacggctgcgacctgggg

SEQ ID NO: 6706 - DNA, 23 bp, Artificial Sequence
  HLA-A targeting gRNA
ggatgtacggctgcgacgtgggg

SEQ ID NO: 6707 - DNA, 23 bp, Artificial Sequence
  HLA-A targeting gRNA
ggatgtacggctgggacctgggg

SEQ ID NO: 6708 - DNA, 23 bp, Artificial Sequence
  HLA-A targeting gRNA
ggatgtatggctgcgacctgggg

SEQ ID NO: 6709 - DNA, 23 bp, Artificial Sequence
  HLA-A targeting gRNA
ggatgtctggctgcgacccgggg

SEQ ID NO: 6710 - DNA, 23 bp, Artificial Sequence
  HLA-A targeting gRNA
ggatgtctggctgcgacctgggg

SEQ ID NO: 6711 - DNA, 23 bp, Artificial Sequence
  HLA-A targeting gRNA
ggatgtctggctgcgacgtgggg

SEQ ID NO: 6712 - DNA, 23 bp, Artificial Sequence
  HLA-A targeting gRNA
ggatgtgaagaaatacttcatgg

SEQ ID NO: 6713 - DNA, 23 bp, Artificial Sequence
  HLA-A targeting gRNA
ggatgtggagaaacacctcatgg

SEQ ID NO: 6714 - DNA, 23 bp, Artificial Sequence
  HLA-A targeting gRNA
ggatgtggagaaatacgtcatgg

SEQ ID NO: 6715 - DNA, 23 bp, Artificial Sequence
  HLA-A targeting gRNA
ggatgtgtggctgcaacctgggg

SEQ ID NO: 6716 - DNA, 23 bp, Artificial Sequence
  HLA-A targeting gRNA
ggatgtgtggctgcgacctgggg

SEQ ID NO: 6717 - DNA, 23 bp, Artificial Sequence
  HLA-A targeting gRNA
ggatgttacgcgtgtgtggtggg

SEQ ID NO: 6718 - DNA, 23 bp, Artificial Sequence
  HLA-A targeting gRNA
ggatgtttcgcgtgtgtcgtggg

SEQ ID NO: 6719 - DNA, 23 bp, Artificial Sequence
  HLA-A targeting gRNA
ggatgtttcgcgtgtgtgatggg

SEQ ID NO: 6720 - DNA, 23 bp, Artificial Sequence
  HLA-A targeting gRNA
ggatgtttcgcgtgtgtggtggg

SEQ ID NO: 6721 - DNA, 23 bp, Artificial Sequence
  HLA-A targeting gRNA
ggatgtttggctgcgacctgggg

SEQ ID NO: 6722 - DNA, 23 bp, Artificial Sequence
  HLA-A targeting gRNA
ggatgtttggctgcgaccttggg

SEQ ID NO: 6723 - DNA, 23 bp, Artificial Sequence
  HLA-A targeting gRNA
ggattacaacgccctgaatgagg

SEQ ID NO: 6724 - DNA, 23 bp, Artificial Sequence
  HLA-A targeting gRNA
ggattacatagccctgaacgagg

SEQ ID NO: 6725 - DNA, 23 bp, Artificial Sequence
  HLA-A targeting gRNA
ggattacatcgcccagaacgagg

SEQ ID NO: 6726 - DNA, 23 bp, Artificial Sequence
  HLA-A targeting gRNA
ggattacatcgccctgaatgagg

SEQ ID NO: 6727 - DNA, 23 bp, Artificial Sequence
  HLA-A targeting gRNA
ggattacatcgccctggacgagg

SEQ ID NO: 6728 - DNA, 23 bp, Artificial Sequence
  HLA-A targeting gRNA
ggattacatcgccgtgaacgagg

SEQ ID NO: 6729 - DNA, 23 bp, Artificial Sequence
  HLA-A targeting gRNA
ggcacacagggtcccaggctggg

SEQ ID NO: 6730 - DNA, 23 bp, Artificial Sequence
  HLA-A targeting gRNA
ggcacctcctgctctatccatgg

SEQ ID NO: 6731 - DNA, 23 bp, Artificial Sequence
  HLA-A targeting gRNA
ggcagagaacaaggcctgagagg

SEQ ID NO: 6732 - DNA, 23 bp, Artificial Sequence
  HLA-A targeting gRNA
ggcagggaaatggcctctgtagg

SEQ ID NO: 6733 - DNA, 23 bp, Artificial Sequence
  HLA-A targeting gRNA
ggcagggaaatggcctctgtggg

SEQ ID NO: 6734 - DNA, 23 bp, Artificial Sequence
  HLA-A targeting gRNA
ggcagggaacacttctacctggg

SEQ ID NO: 6735 - DNA, 23 bp, Artificial Sequence
  HLA-A targeting gRNA
ggcagggccatgcaatcttaggg

SEQ ID NO: 6736 - DNA, 23 bp, Artificial Sequence
  HLA-A targeting gRNA
ggcagggccatgcgatcttaggg

SEQ ID NO: 6737 - DNA, 23 bp, Artificial Sequence
  HLA-A targeting gRNA
ggcagggccatgtgatcttaggg

SEQ ID NO: 6738 - DNA, 23 bp, Artificial Sequence
  HLA-A targeting gRNA
ggcagggccatgtgattttaggg

SEQ ID NO: 6739 - DNA, 23 bp, Artificial Sequence
  HLA-A targeting gRNA
ggcaggtctgggggtgggtgggg

SEQ ID NO: 6740 - DNA, 23 bp, Artificial Sequence
  HLA-A targeting gRNA
ggcatggcctcccacgaggaggg

SEQ ID NO: 6741 - DNA, 23 bp, Artificial Sequence
  HLA-A targeting gRNA
ggccaaaatccccgcgggttggg

SEQ ID NO: 6742 - DNA, 23 bp, Artificial Sequence
  HLA-A targeting gRNA
ggccagggtctcacatcatccgg

SEQ ID NO: 6743 - DNA, 23 bp, Artificial Sequence
  HLA-A targeting gRNA
ggccagggtctcacatccagagg

SEQ ID NO: 6744 - DNA, 23 bp, Artificial Sequence
  HLA-A targeting gRNA
ggccatccccggcgacctatagg

SEQ ID NO: 6745 - DNA, 23 bp, Artificial Sequence
  HLA-A targeting gRNA
ggccatcccgggagatctacagg

SEQ ID NO: 6746 - DNA, 23 bp, Artificial Sequence
  HLA-A targeting gRNA
ggccatcccgggagatctacggg

SEQ ID NO: 6747 - DNA, 23 bp, Artificial Sequence
  HLA-A targeting gRNA
ggccatcccgggagatctatagg

SEQ ID NO: 6748 - DNA, 23 bp, Artificial Sequence
  HLA-A targeting gRNA
ggccatcccgggcgatctatagg

SEQ ID NO: 6749 - DNA, 23 bp, Artificial Sequence
  HLA-A targeting gRNA
ggccatgccgggagatctacggg

SEQ ID NO: 6750 - DNA, 23 bp, Artificial Sequence
  HLA-A targeting gRNA
ggccatgggcttctaccctgcgg

SEQ ID NO: 6751 - DNA, 23 bp, Artificial Sequence
  HLA-A targeting gRNA
ggccccgggcggggctctcaggg

SEQ ID NO: 6752 - DNA, 23 bp, Artificial Sequence
  HLA-A targeting gRNA
ggcccctcctgctccacccacgg

SEQ ID NO: 6753 - DNA, 23 bp, Artificial Sequence
  HLA-A targeting gRNA
ggcccctcctgctccatccacgg

SEQ ID NO: 6754 - DNA, 23 bp, Artificial Sequence
  HLA-A targeting gRNA
ggcccctcctgctctatccaggg

SEQ ID NO: 6755 - DNA, 23 bp, Artificial Sequence
  HLA-A targeting gRNA
ggcccctcctgctctatccatgg

SEQ ID NO: 6756 - DNA, 23 bp, Artificial Sequence
  HLA-A targeting gRNA
ggcccctccttctccacccacgg

SEQ ID NO: 6757 - DNA, 23 bp, Artificial Sequence
  HLA-A targeting gRNA
ggcccctcttgctctatccacgg

SEQ ID NO: 6758 - DNA, 23 bp, Artificial Sequence
  HLA-A targeting gRNA
ggcccctcttgctctatccatgg

SEQ ID NO: 6759 - DNA, 23 bp, Artificial Sequence
  HLA-A targeting gRNA
ggcccgcccggcgagggcgcagg

SEQ ID NO: 6760 - DNA, 23 bp, Artificial Sequence
  HLA-A targeting gRNA
ggccctcccggcgagggcgcagg

SEQ ID NO: 6761 - DNA, 23 bp, Artificial Sequence
  HLA-A targeting gRNA
ggccctgaccgagacctgggcgg

SEQ ID NO: 6762 - DNA, 23 bp, Artificial Sequence
  HLA-A targeting gRNA
ggccctgggaaaggaggggaagg

SEQ ID NO: 6763 - DNA, 23 bp, Artificial Sequence
  HLA-A targeting gRNA
ggccctgggcttctaccctacgg

SEQ ID NO: 6764 - DNA, 23 bp, Artificial Sequence
  HLA-A targeting gRNA
ggccctgggcttctaccctgggg

SEQ ID NO: 6765 - DNA, 23 bp, Artificial Sequence
  HLA-A targeting gRNA
ggccctgggcttctaccctgtgg

SEQ ID NO: 6766 - DNA, 23 bp, Artificial Sequence
  HLA-A targeting gRNA
ggccctgggtttctaccctgcgg

SEQ ID NO: 6767 - DNA, 23 bp, Artificial Sequence
  HLA-A targeting gRNA
ggccctgggtttctaccctgtgg

SEQ ID NO: 6768 - DNA, 23 bp, Artificial Sequence
  HLA-A targeting gRNA
ggccctgtgcttctaccctgcgg

SEQ ID NO: 6769 - DNA, 23 bp, Artificial Sequence
  HLA-A targeting gRNA
ggccgcctccaacttgcgctggg

SEQ ID NO: 6770 - DNA, 23 bp, Artificial Sequence
  HLA-A targeting gRNA
ggccgcctccaacttgggctggg

SEQ ID NO: 6771 - DNA, 23 bp, Artificial Sequence
  HLA-A targeting gRNA
ggccgcctccaacttgtgctggg

SEQ ID NO: 6772 - DNA, 23 bp, Artificial Sequence
  HLA-A targeting gRNA
ggccgcctcccacttacgctggg

SEQ ID NO: 6773 - DNA, 23 bp, Artificial Sequence
  HLA-A targeting gRNA
ggccgcctcccacttgagctggg

SEQ ID NO: 6774 - DNA, 23 bp, Artificial Sequence
  HLA-A targeting gRNA
ggccgcctcccacttgggctggg

SEQ ID NO: 6775 - DNA, 23 bp, Artificial Sequence
  HLA-A targeting gRNA
ggccgcctcccatttgcgctggg

SEQ ID NO: 6776 - DNA, 23 bp, Artificial Sequence
  HLA-A targeting gRNA
ggcctcagggaggcggatctcgg

SEQ ID NO: 6777 - DNA, 23 bp, Artificial Sequence
  HLA-A targeting gRNA
ggcctcaggggggcggatctcgg

SEQ ID NO: 6778 - DNA, 23 bp, Artificial Sequence
  HLA-A targeting gRNA
ggcctcaggggggtggatctcgg

SEQ ID NO: 6779 - DNA, 23 bp, Artificial Sequence
  HLA-A targeting gRNA
ggcctcagggggtcggatctcgg

SEQ ID NO: 6780 - DNA, 23 bp, Artificial Sequence
  HLA-A targeting gRNA
ggcctcccgagagcagcaggagg

SEQ ID NO: 6781 - DNA, 23 bp, Artificial Sequence
  HLA-A targeting gRNA
ggcctctatggagaggagcgagg

SEQ ID NO: 6782 - DNA, 23 bp, Artificial Sequence
  HLA-A targeting gRNA
ggcctctgccgggaggagcgagg

SEQ ID NO: 6783 - DNA, 23 bp, Artificial Sequence
  HLA-A targeting gRNA
ggcctctgcggagaggaacgagg

SEQ ID NO: 6784 - DNA, 23 bp, Artificial Sequence
  HLA-A targeting gRNA
ggcctctgcggagaggagcgagg

SEQ ID NO: 6785 - DNA, 23 bp, Artificial Sequence
  HLA-A targeting gRNA
ggcctctgcggagaggagggagg

SEQ ID NO: 6786 - DNA, 23 bp, Artificial Sequence
  HLA-A targeting gRNA
ggcctctgctgagaggagcgagg

SEQ ID NO: 6787 - DNA, 23 bp, Artificial Sequence
  HLA-A targeting gRNA
ggcctctggggagaggagcgagg

SEQ ID NO: 6788 - DNA, 23 bp, Artificial Sequence
  HLA-A targeting gRNA
ggcctctgtagggaggagcaagg

SEQ ID NO: 6789 - DNA, 23 bp, Artificial Sequence
  HLA-A targeting gRNA
ggcctctgtggggaggagagagg

SEQ ID NO: 6790 - DNA, 23 bp, Artificial Sequence
  HLA-A targeting gRNA
ggcctctgtggggaggagcgagg

SEQ ID NO: 6791 - DNA, 23 bp, Artificial Sequence
  HLA-A targeting gRNA
ggcgaccccggccgtacgtgggg

SEQ ID NO: 6792 - DNA, 23 bp, Artificial Sequence
  HLA-A targeting gRNA
ggcgacccgggccgtacgtgggg

SEQ ID NO: 6793 - DNA, 23 bp, Artificial Sequence
  HLA-A targeting gRNA
ggcgacccgggccgtccgtgggg

SEQ ID NO: 6794 - DNA, 23 bp, Artificial Sequence
  HLA-A targeting gRNA
ggcgccatggatagagcaagagg

SEQ ID NO: 6795 - DNA, 23 bp, Artificial Sequence
  HLA-A targeting gRNA
ggcgccatggatagagcaggagg

SEQ ID NO: 6796 - DNA, 23 bp, Artificial Sequence
  HLA-A targeting gRNA
ggcgcccagggcgccatcctcgg

SEQ ID NO: 6797 - DNA, 23 bp, Artificial Sequence
  HLA-A targeting gRNA
ggcgcccagggctccgtcctcgg

SEQ ID NO: 6798 - DNA, 23 bp, Artificial Sequence
  HLA-A targeting gRNA
ggcgcccgcggctcccccctcgg

SEQ ID NO: 6799 - DNA, 23 bp, Artificial Sequence
  HLA-A targeting gRNA
ggcgcccgcggctcccctctcgg

SEQ ID NO: 6800 - DNA, 23 bp, Artificial Sequence
  HLA-A targeting gRNA
ggcgcccgcggctcccctcttgg

SEQ ID NO: 6801 - DNA, 23 bp, Artificial Sequence
  HLA-A targeting gRNA
ggcgcccgcggctcctctctcgg

SEQ ID NO: 6802 - DNA, 23 bp, Artificial Sequence
  HLA-A targeting gRNA
ggcgcccgcggctccttcctcgg

SEQ ID NO: 6803 - DNA, 23 bp, Artificial Sequence
  HLA-A targeting gRNA
ggcgcccggggcgccatcctcgg

SEQ ID NO: 6804 - DNA, 23 bp, Artificial Sequence
  HLA-A targeting gRNA
ggcgcccggggctccatcctcgg

SEQ ID NO: 6805 - DNA, 23 bp, Artificial Sequence
  HLA-A targeting gRNA
ggcgcccggggctcccctctcgg

SEQ ID NO: 6806 - DNA, 23 bp, Artificial Sequence
  HLA-A targeting gRNA
ggcgcccggggctccgtcctcgg

SEQ ID NO: 6807 - DNA, 23 bp, Artificial Sequence
  HLA-A targeting gRNA
ggcgccctggatagagcaggagg

SEQ ID NO: 6808 - DNA, 23 bp, Artificial Sequence
  HLA-A targeting gRNA
ggcgccgtggatagagcaagagg

SEQ ID NO: 6809 - DNA, 23 bp, Artificial Sequence
  HLA-A targeting gRNA
ggcgccgtgggtggagaaggagg

SEQ ID NO: 6810 - DNA, 23 bp, Artificial Sequence
  HLA-A targeting gRNA
ggcgccgtgggtggagcaggagg

SEQ ID NO: 6811 - DNA, 23 bp, Artificial Sequence
  HLA-A targeting gRNA
ggcgcctgcggctcccctcttgg

SEQ ID NO: 6812 - DNA, 23 bp, Artificial Sequence
  HLA-A targeting gRNA
ggcgcggtggatagagcaggagg

SEQ ID NO: 6813 - DNA, 23 bp, Artificial Sequence
  HLA-A targeting gRNA
ggcggcccgtatggcggagcagg

SEQ ID NO: 6814 - DNA, 23 bp, Artificial Sequence
  HLA-A targeting gRNA
ggcggcccgtgcggcggagcagg

SEQ ID NO: 6815 - DNA, 23 bp, Artificial Sequence
  HLA-A targeting gRNA
ggcggcccgtgtggcggagcagg

SEQ ID NO: 6816 - DNA, 23 bp, Artificial Sequence
  HLA-A targeting gRNA
ggcggggcacacttctacctggg

SEQ ID NO: 6817 - DNA, 23 bp, Artificial Sequence
  HLA-A targeting gRNA
ggcggggcggggcggggccgggg

SEQ ID NO: 6818 - DNA, 23 bp, Artificial Sequence
  HLA-A targeting gRNA
ggcggggcggggcggggctcggg

SEQ ID NO: 6819 - DNA, 23 bp, Artificial Sequence
  HLA-A targeting gRNA
ggcggggctctcagggtctcagg

SEQ ID NO: 6820 - DNA, 23 bp, Artificial Sequence
  HLA-A targeting gRNA
ggcggggggggggtggggtgggg

SEQ ID NO: 6821 - DNA, 23 bp, Artificial Sequence
  HLA-A targeting gRNA
ggcggggttctcagggtctcagg

SEQ ID NO: 6822 - DNA, 23 bp, Artificial Sequence
  HLA-A targeting gRNA
ggcgggtcccgcggcctcagggg

SEQ ID NO: 6823 - DNA, 23 bp, Artificial Sequence
  HLA-A targeting gRNA
ggcgggtcccgcggcctcggggg

SEQ ID NO: 6824 - DNA, 23 bp, Artificial Sequence
  HLA-A targeting gRNA
ggcgggtctggggcggggtgggg

SEQ ID NO: 6825 - DNA, 23 bp, Artificial Sequence
  HLA-A targeting gRNA
ggcgggtctgggggggggggggg

SEQ ID NO: 6826 - DNA, 23 bp, Artificial Sequence
  HLA-A targeting gRNA
ggcgggtctgggggtgggtgggg

SEQ ID NO: 6827 - DNA, 23 bp, Artificial Sequence
  HLA-A targeting gRNA
ggcggtgtagaaatacctcaagg

SEQ ID NO: 6828 - DNA, 23 bp, Artificial Sequence
  HLA-A targeting gRNA
ggcggtgtagaaatacctcatgg

SEQ ID NO: 6829 - DNA, 23 bp, Artificial Sequence
  HLA-A targeting gRNA
ggcggtgtagaaatacttcatgg

SEQ ID NO: 6830 - DNA, 23 bp, Artificial Sequence
  HLA-A targeting gRNA
ggcggtgtcgaaatacctcatgg

SEQ ID NO: 6831 - DNA, 23 bp, Artificial Sequence
  HLA-A targeting gRNA
ggcggtgtggaaatacctcatgg

SEQ ID NO: 6832 - DNA, 23 bp, Artificial Sequence
  HLA-A targeting gRNA
ggcgtctctgaggaaatggaggg

SEQ ID NO: 6833 - DNA, 23 bp, Artificial Sequence
  HLA-A targeting gRNA
ggctacaaccagagcgaggccgg

SEQ ID NO: 6834 - DNA, 23 bp, Artificial Sequence
  HLA-A targeting gRNA
ggctcccatctcagggtgagggg

SEQ ID NO: 6835 - DNA, 23 bp, Artificial Sequence
  HLA-A targeting gRNA
ggctcccctctcggactcgcggg

SEQ ID NO: 6836 - DNA, 23 bp, Artificial Sequence
  HLA-A targeting gRNA
ggctccccttctcggactcgcgg

SEQ ID NO: 6837 - DNA, 23 bp, Artificial Sequence
  HLA-A targeting gRNA
ggctcccgcggctcccctcttgg

SEQ ID NO: 6838 - DNA, 23 bp, Artificial Sequence
  HLA-A targeting gRNA
ggctcccggggctccgtcctcgg

SEQ ID NO: 6839 - DNA, 23 bp, Artificial Sequence
  HLA-A targeting gRNA
ggctctgggaaaagaggagaagg

SEQ ID NO: 6840 - DNA, 23 bp, Artificial Sequence
  HLA-A targeting gRNA
ggctctgggaaaggaggagaagg

SEQ ID NO: 6841 - DNA, 23 bp, Artificial Sequence
  HLA-A targeting gRNA
ggctctgggaaaggaggggaagg

SEQ ID NO: 6842 - DNA, 23 bp, Artificial Sequence
  HLA-A targeting gRNA
ggctgcaacctggggcccgacgg

SEQ ID NO: 6843 - DNA, 23 bp, Artificial Sequence
  HLA-A targeting gRNA
ggctgcctcccacttgcgctggg

SEQ ID NO: 6844 - DNA, 23 bp, Artificial Sequence
  HLA-A targeting gRNA
ggctgcgacatggggccggacgg

SEQ ID NO: 6845 - DNA, 23 bp, Artificial Sequence
  HLA-A targeting gRNA
ggctgcgacccggggcccgacgg

SEQ ID NO: 6846 - DNA, 23 bp, Artificial Sequence
  HLA-A targeting gRNA
ggctgcgacctgggcccgacggg

SEQ ID NO: 6847 - DNA, 23 bp, Artificial Sequence
  HLA-A targeting gRNA
ggctgcgacctggggccccacgg

SEQ ID NO: 6848 - DNA, 23 bp, Artificial Sequence
  HLA-A targeting gRNA
ggctgcgacctggggcccgacgg

SEQ ID NO: 6849 - DNA, 23 bp, Artificial Sequence
  HLA-A targeting gRNA
ggctgcgacctggggccctacgg

SEQ ID NO: 6850 - DNA, 23 bp, Artificial Sequence
  HLA-A targeting gRNA
ggctgcgacctggggccggacgg

SEQ ID NO: 6851 - DNA, 23 bp, Artificial Sequence
  HLA-A targeting gRNA
ggctgcgacctggggctcgacgg

SEQ ID NO: 6852 - DNA, 23 bp, Artificial Sequence
  HLA-A targeting gRNA
ggctgcgacctgggtcccgacgg

SEQ ID NO: 6853 - DNA, 23 bp, Artificial Sequence
  HLA-A targeting gRNA
ggctgcgaccttgggcccgacgg

SEQ ID NO: 6854 - DNA, 23 bp, Artificial Sequence
  HLA-A targeting gRNA
ggctgcgacgtggagccggacgg

SEQ ID NO: 6855 - DNA, 23 bp, Artificial Sequence
  HLA-A targeting gRNA
ggctgcgacgtggggcccgacgg

SEQ ID NO: 6856 - DNA, 23 bp, Artificial Sequence
  HLA-A targeting gRNA
ggctgcgacgtggggcccggcgg

SEQ ID NO: 6857 - DNA, 23 bp, Artificial Sequence
  HLA-A targeting gRNA
ggctgcgacgtggggccggatgg

SEQ ID NO: 6858 - DNA, 23 bp, Artificial Sequence
  HLA-A targeting gRNA
ggctgctgcaggggtcaaagagg

SEQ ID NO: 6859 - DNA, 23 bp, Artificial Sequence
  HLA-A targeting gRNA
ggctgctgcaggggtcaaagggg

SEQ ID NO: 6860 - DNA, 23 bp, Artificial Sequence
  HLA-A targeting gRNA
ggctggagtagaacaaaaacagg

SEQ ID NO: 6861 - DNA, 23 bp, Artificial Sequence
  HLA-A targeting gRNA
ggctgggacctggggcccgacgg

SEQ ID NO: 6862 - DNA, 23 bp, Artificial Sequence
  HLA-A targeting gRNA
ggctgtcgaacctcacgaactgg

SEQ ID NO: 6863 - DNA, 23 bp, Artificial Sequence
  HLA-A targeting gRNA
ggcttacatcgccctgaacgagg

SEQ ID NO: 6864 - DNA, 23 bp, Artificial Sequence
  HLA-A targeting gRNA
gggaaaagaggagaaggtgaggg

SEQ ID NO: 6865 - DNA, 23 bp, Artificial Sequence
  HLA-A targeting gRNA
gggaaaaggcctaggtaatgggg

SEQ ID NO: 6866 - DNA, 23 bp, Artificial Sequence
  HLA-A targeting gRNA
gggaaaaggcctgggtaatgggg

SEQ ID NO: 6867 - DNA, 23 bp, Artificial Sequence
  HLA-A targeting gRNA
gggaaacggcctctgcggagagg

SEQ ID NO: 6868 - DNA, 23 bp, Artificial Sequence
  HLA-A targeting gRNA
gggaaacggcctctgctgagagg

SEQ ID NO: 6869 - DNA, 23 bp, Artificial Sequence
  HLA-A targeting gRNA
gggaaacggcctctggggagagg

SEQ ID NO: 6870 - DNA, 23 bp, Artificial Sequence
  HLA-A targeting gRNA
gggaaagcagctgtgggttctgg

SEQ ID NO: 6871 - DNA, 23 bp, Artificial Sequence
  HLA-A targeting gRNA
gggaaagcagttgtgggttctgg

SEQ ID NO: 6872 - DNA, 23 bp, Artificial Sequence
  HLA-A targeting gRNA
gggaaaggaagggaagatgaggg

SEQ ID NO: 6873 - DNA, 23 bp, Artificial Sequence
  HLA-A targeting gRNA
gggaaaggaggagaaggtgaggg

SEQ ID NO: 6874 - DNA, 23 bp, Artificial Sequence
  HLA-A targeting gRNA
gggaaaggaggggaagacgaggg

SEQ ID NO: 6875 - DNA, 23 bp, Artificial Sequence
  HLA-A targeting gRNA
gggaaaggaggggaagatgaggg

SEQ ID NO: 6876 - DNA, 23 bp, Artificial Sequence
  HLA-A targeting gRNA
gggaaaggaggggaaggtgaggg

SEQ ID NO: 6877 - DNA, 23 bp, Artificial Sequence
  HLA-A targeting gRNA
gggaaatggcctctgccgggagg

SEQ ID NO: 6878 - DNA, 23 bp, Artificial Sequence
  HLA-A targeting gRNA
gggaaatggcctctgtagggagg

SEQ ID NO: 6879 - DNA, 23 bp, Artificial Sequence
  HLA-A targeting gRNA
gggaaatggcctctgtggggagg

SEQ ID NO: 6880 - DNA, 23 bp, Artificial Sequence
  HLA-A targeting gRNA
gggaacctgggggcgaggagggg

SEQ ID NO: 6881 - DNA, 23 bp, Artificial Sequence
  HLA-A targeting gRNA
gggaagaaaatgccctatgaggg

SEQ ID NO: 6882 - DNA, 23 bp, Artificial Sequence
  HLA-A targeting gRNA
gggaagaaaatgccctgtgaggg

SEQ ID NO: 6883 - DNA, 23 bp, Artificial Sequence
  HLA-A targeting gRNA
gggaagaaaatgtcctgtgaggg

SEQ ID NO: 6884 - DNA, 23 bp, Artificial Sequence
  HLA-A targeting gRNA
gggaagatggctcccatctcagg

SEQ ID NO: 6885 - DNA, 23 bp, Artificial Sequence
  HLA-A targeting gRNA
gggaagcaaatgtcctgtgaggg

SEQ ID NO: 6886 - DNA, 23 bp, Artificial Sequence
  HLA-A targeting gRNA
gggaagcagcatccacacagggg

SEQ ID NO: 6887 - DNA, 23 bp, Artificial Sequence
  HLA-A targeting gRNA
gggaagcagcatcctcacagggg

SEQ ID NO: 6888 - DNA, 23 bp, Artificial Sequence
  HLA-A targeting gRNA
gggaagcagcatgcacacagggg

SEQ ID NO: 6889 - DNA, 23 bp, Artificial Sequence
  HLA-A targeting gRNA
gggaagccgcgcagggaggaggg

SEQ ID NO: 6890 - DNA, 23 bp, Artificial Sequence
  HLA-A targeting gRNA
gggaagcggcctctatggagagg

SEQ ID NO: 6891 - DNA, 23 bp, Artificial Sequence
  HLA-A targeting gRNA
gggaagcggcctctgcggagagg

SEQ ID NO: 6892 - DNA, 23 bp, Artificial Sequence
  HLA-A targeting gRNA
gggaaggctccccactgccccgg

SEQ ID NO: 6893 - DNA, 23 bp, Artificial Sequence
  HLA-A targeting gRNA
gggaatcggcctctgcggagagg

SEQ ID NO: 6894 - DNA, 23 bp, Artificial Sequence
  HLA-A targeting gRNA
gggacacctggggtggggaaggg

SEQ ID NO: 6895 - DNA, 23 bp, Artificial Sequence
  HLA-A targeting gRNA
gggacagtggactgggaagacgg

SEQ ID NO: 6896 - DNA, 23 bp, Artificial Sequence
  HLA-A targeting gRNA
gggaccacggcgacgctgattgg

SEQ ID NO: 6897 - DNA, 23 bp, Artificial Sequence
  HLA-A targeting gRNA
gggaccccggcgacactgattgg

SEQ ID NO: 6898 - DNA, 23 bp, Artificial Sequence
  HLA-A targeting gRNA
gggaccccggcgacgctgattgg

SEQ ID NO: 6899 - DNA, 23 bp, Artificial Sequence
  HLA-A targeting gRNA
gggaccgcaggcgggggcgcagg

SEQ ID NO: 6900 - DNA, 23 bp, Artificial Sequence
  HLA-A targeting gRNA
gggaccgcaggcgggggctcagg

SEQ ID NO: 6901 - DNA, 23 bp, Artificial Sequence
  HLA-A targeting gRNA
gggaccgcggcaacgctgattgg

SEQ ID NO: 6902 - DNA, 23 bp, Artificial Sequence
  HLA-A targeting gRNA
gggaccgcggcgacgctgattgg

SEQ ID NO: 6903 - DNA, 23 bp, Artificial Sequence
  HLA-A targeting gRNA
gggacctgcgccccgggccgggg

SEQ ID NO: 6904 - DNA, 23 bp, Artificial Sequence
  HLA-A targeting gRNA
gggacgcgtcacgagtatcccgg

SEQ ID NO: 6905 - DNA, 23 bp, Artificial Sequence
  HLA-A targeting gRNA
gggacgcgtcacgagtatcctgg

SEQ ID NO: 6906 - DNA, 23 bp, Artificial Sequence
  HLA-A targeting gRNA
gggacgcgtcatgagtattcagg

SEQ ID NO: 6907 - DNA, 23 bp, Artificial Sequence
  HLA-A targeting gRNA
gggacggtggactgggaagacgg

SEQ ID NO: 6908 - DNA, 23 bp, Artificial Sequence
  HLA-A targeting gRNA
gggacggtggactgggaagatgg

SEQ ID NO: 6909 - DNA, 23 bp, Artificial Sequence
  HLA-A targeting gRNA
gggacggtggattgggaagatgg

SEQ ID NO: 6910 - DNA, 23 bp, Artificial Sequence
  HLA-A targeting gRNA
gggacgtttcgagtgtgtggtgg

SEQ ID NO: 6911 - DNA, 23 bp, Artificial Sequence
  HLA-A targeting gRNA
gggactctccgcggccgggccgg

SEQ ID NO: 6912 - DNA, 23 bp, Artificial Sequence
  HLA-A targeting gRNA
gggactgcggagacgctgattgg

SEQ ID NO: 6913 - DNA, 23 bp, Artificial Sequence
  HLA-A targeting gRNA
gggactgcgtagacgctgattgg

SEQ ID NO: 6914 - DNA, 23 bp, Artificial Sequence
  HLA-A targeting gRNA
gggactggggcggggctcggggg

SEQ ID NO: 6915 - DNA, 23 bp, Artificial Sequence
  HLA-A targeting gRNA
gggagaagaagtgaaactcaggg

SEQ ID NO: 6916 - DNA, 23 bp, Artificial Sequence
  HLA-A targeting gRNA
gggagaagaagtgaaactcgtgg

SEQ ID NO: 6917 - DNA, 23 bp, Artificial Sequence
  HLA-A targeting gRNA
gggagaagaagtgaaactcttgg

SEQ ID NO: 6918 - DNA, 23 bp, Artificial Sequence
  HLA-A targeting gRNA
gggagaatccgagtccgggtggg

SEQ ID NO: 6919 - DNA, 23 bp, Artificial Sequence
  HLA-A targeting gRNA
gggagaatctgagtccgggtggg

SEQ ID NO: 6920 - DNA, 23 bp, Artificial Sequence
  HLA-A targeting gRNA
gggagaatgtgagtccgggtggg

SEQ ID NO: 6921 - DNA, 23 bp, Artificial Sequence
  HLA-A targeting gRNA
gggagactgggggcgaggagggg

SEQ ID NO: 6922 - DNA, 23 bp, Artificial Sequence
  HLA-A targeting gRNA
gggagactgggggtgaggagggg

SEQ ID NO: 6923 - DNA, 23 bp, Artificial Sequence
  HLA-A targeting gRNA
gggagcctgggagcgaggagggg

SEQ ID NO: 6924 - DNA, 23 bp, Artificial Sequence
  HLA-A targeting gRNA
gggagcctgggggagaggagggg

SEQ ID NO: 6925 - DNA, 23 bp, Artificial Sequence
  HLA-A targeting gRNA
gggagcctgggggccaggagggg

SEQ ID NO: 6926 - DNA, 23 bp, Artificial Sequence
  HLA-A targeting gRNA
gggagcctgggggcgaggagggg

SEQ ID NO: 6927 - DNA, 23 bp, Artificial Sequence
  HLA-A targeting gRNA
gggagcctgggggtgaggagggg

SEQ ID NO: 6928 - DNA, 23 bp, Artificial Sequence
  HLA-A targeting gRNA
gggagctcaggtcctcgttcagg

SEQ ID NO: 6929 - DNA, 23 bp, Artificial Sequence
  HLA-A targeting gRNA
gggaggagagaggggaccgcagg

SEQ ID NO: 6930 - DNA, 23 bp, Artificial Sequence
  HLA-A targeting gRNA
gggaggagcaaggggaccgcagg

SEQ ID NO: 6931 - DNA, 23 bp, Artificial Sequence
  HLA-A targeting gRNA
gggaggagcgaggggaccgcagg

SEQ ID NO: 6932 - DNA, 23 bp, Artificial Sequence
  HLA-A targeting gRNA
gggaggctgggggcgaggagggg

SEQ ID NO: 6933 - DNA, 23 bp, Artificial Sequence
  HLA-A targeting gRNA
gggagggaaatggcctctgccgg

SEQ ID NO: 6934 - DNA, 23 bp, Artificial Sequence
  HLA-A targeting gRNA
gggagggaaatggcctctgtggg

SEQ ID NO: 6935 - DNA, 23 bp, Artificial Sequence
  HLA-A targeting gRNA
gggagggcctgtgcgtggagtgg

SEQ ID NO: 6936 - DNA, 23 bp, Artificial Sequence
  HLA-A targeting gRNA
gggaggggccctcccggcgaggg

SEQ ID NO: 6937 - DNA, 23 bp, Artificial Sequence
  HLA-A targeting gRNA
gggagggggcagagggggaaagg

SEQ ID NO: 6938 - DNA, 23 bp, Artificial Sequence
  HLA-A targeting gRNA
gggagtcgtgacctgcgccccgg

SEQ ID NO: 6939 - DNA, 23 bp, Artificial Sequence
  HLA-A targeting gRNA
gggatgcagcatccacacagggg

SEQ ID NO: 6940 - DNA, 23 bp, Artificial Sequence
  HLA-A targeting gRNA
gggatgcgtcacgagtatcctgg

SEQ ID NO: 6941 - DNA, 23 bp, Artificial Sequence
  HLA-A targeting gRNA
gggatggcctcccacgaggaagg

SEQ ID NO: 6942 - DNA, 23 bp, Artificial Sequence
  HLA-A targeting gRNA
gggatggcctcccacgaggaggg

SEQ ID NO: 6943 - DNA, 23 bp, Artificial Sequence
  HLA-A targeting gRNA
gggatggccttccacgaggaggg

SEQ ID NO: 6944 - DNA, 23 bp, Artificial Sequence
  HLA-A targeting gRNA
gggatggtaggctgggaagatgg

SEQ ID NO: 6945 - DNA, 23 bp, Artificial Sequence
  HLA-A targeting gRNA
gggatggtggactgggaagacgg

SEQ ID NO: 6946 - DNA, 23 bp, Artificial Sequence
  HLA-A targeting gRNA
gggatggtggactgggaagatgg

SEQ ID NO: 6947 - DNA, 23 bp, Artificial Sequence
  HLA-A targeting gRNA
gggatgttacgcgtgtgtggtgg

SEQ ID NO: 6948 - DNA, 23 bp, Artificial Sequence
  HLA-A targeting gRNA
gggatgtttcgcgtgtgtcgtgg

SEQ ID NO: 6949 - DNA, 23 bp, Artificial Sequence
  HLA-A targeting gRNA
gggatgtttcgcgtgtgtgatgg

SEQ ID NO: 6950 - DNA, 23 bp, Artificial Sequence
  HLA-A targeting gRNA
gggatgtttcgcgtgtgtggtgg

SEQ ID NO: 6951 - DNA, 23 bp, Artificial Sequence
  HLA-A targeting gRNA
gggcagagggggaaaggcctggg

SEQ ID NO: 6952 - DNA, 23 bp, Artificial Sequence
  HLA-A targeting gRNA
gggcaggatcaggaaacacaagg

SEQ ID NO: 6953 - DNA, 23 bp, Artificial Sequence
  HLA-A targeting gRNA
gggcaggatcaggaaacacaggg

SEQ ID NO: 6954 - DNA, 23 bp, Artificial Sequence
  HLA-A targeting gRNA
gggcaggatcaggaaacacgagg

SEQ ID NO: 6955 - DNA, 23 bp, Artificial Sequence
  HLA-A targeting gRNA
gggcaggatcaggaaacacgggg

SEQ ID NO: 6956 - DNA, 23 bp, Artificial Sequence
  HLA-A targeting gRNA
gggcaggatcaggaaacatgggg

SEQ ID NO: 6957 - DNA, 23 bp, Artificial Sequence
  HLA-A targeting gRNA
gggcattttcttcccacaggtgg

SEQ ID NO: 6958 - DNA, 23 bp, Artificial Sequence
  HLA-A targeting gRNA
gggccccccagagcagcaggagg

SEQ ID NO: 6959 - DNA, 23 bp, Artificial Sequence
  HLA-A targeting gRNA
gggccctgggcttctaccctggg

SEQ ID NO: 6960 - DNA, 23 bp, Artificial Sequence
  HLA-A targeting gRNA
gggccgccgagagcagcaggagg

SEQ ID NO: 6961 - DNA, 23 bp, Artificial Sequence
  HLA-A targeting gRNA
gggccgcctccaacttgcgctgg

SEQ ID NO: 6962 - DNA, 23 bp, Artificial Sequence
  HLA-A targeting gRNA
gggccgcctccaacttgggctgg

SEQ ID NO: 6963 - DNA, 23 bp, Artificial Sequence
  HLA-A targeting gRNA
gggccgcctccaacttgtgctgg

SEQ ID NO: 6964 - DNA, 23 bp, Artificial Sequence
  HLA-A targeting gRNA
gggccgcctcccacttacgctgg

SEQ ID NO: 6965 - DNA, 23 bp, Artificial Sequence
  HLA-A targeting gRNA
gggccgcctcccacttgagctgg

SEQ ID NO: 6966 - DNA, 23 bp, Artificial Sequence
  HLA-A targeting gRNA
gggccgcctcccacttgggctgg

SEQ ID NO: 6967 - DNA, 23 bp, Artificial Sequence
  HLA-A targeting gRNA
gggccgcctcccatttgcgctgg

SEQ ID NO: 6968 - DNA, 23 bp, Artificial Sequence
  HLA-A targeting gRNA
gggccgcgtctgcaatggggagg

SEQ ID NO: 6969 - DNA, 23 bp, Artificial Sequence
  HLA-A targeting gRNA
gggccgcgtctgcattggggagg

SEQ ID NO: 6970 - DNA, 23 bp, Artificial Sequence
  HLA-A targeting gRNA
gggccggtgagtgcgggatcggg

SEQ ID NO: 6971 - DNA, 23 bp, Artificial Sequence
  HLA-A targeting gRNA
gggccggtgagtgcggggtcggg

SEQ ID NO: 6972 - DNA, 23 bp, Artificial Sequence
  HLA-A targeting gRNA
gggccggtgagtgcggggttggg

SEQ ID NO: 6973 - DNA, 23 bp, Artificial Sequence
  HLA-A targeting gRNA
gggccgtgtctgcactggggagg

SEQ ID NO: 6974 - DNA, 23 bp, Artificial Sequence
  HLA-A targeting gRNA
gggccgtgtctgcattggggagg

SEQ ID NO: 6975 - DNA, 23 bp, Artificial Sequence
  HLA-A targeting gRNA
gggcctgtgagtgcgaggttggg

SEQ ID NO: 6976 - DNA, 23 bp, Artificial Sequence
  HLA-A targeting gRNA
gggcctgtgagtgcggggttagg

SEQ ID NO: 6977 - DNA, 23 bp, Artificial Sequence
  HLA-A targeting gRNA
gggcctgtgagtgcggggttggg

SEQ ID NO: 6978 - DNA, 23 bp, Artificial Sequence
  HLA-A targeting gRNA
gggcgaccccggccgtacgtggg

SEQ ID NO: 6979 - DNA, 23 bp, Artificial Sequence
  HLA-A targeting gRNA
gggcgacccgggccgtacgtggg

SEQ ID NO: 6980 - DNA, 23 bp, Artificial Sequence
  HLA-A targeting gRNA
gggcgacccgggccgtccgtggg

SEQ ID NO: 6981 - DNA, 23 bp, Artificial Sequence
  HLA-A targeting gRNA
gggcgccatcctcggactcgcgg

SEQ ID NO: 6982 - DNA, 23 bp, Artificial Sequence
  HLA-A targeting gRNA
gggcgccatcctcggactcgtgg

SEQ ID NO: 6983 - DNA, 23 bp, Artificial Sequence
  HLA-A targeting gRNA
gggcgccatgaccagcatctcgg

SEQ ID NO: 6984 - DNA, 23 bp, Artificial Sequence
  HLA-A targeting gRNA
gggcgccatgaccagcatcttgg

SEQ ID NO: 6985 - DNA, 23 bp, Artificial Sequence
  HLA-A targeting gRNA
gggcgccatgacccgcatctcgg

SEQ ID NO: 6986 - DNA, 23 bp, Artificial Sequence
  HLA-A targeting gRNA
gggcgccgtgacccgcatctcgg

SEQ ID NO: 6987 - DNA, 23 bp, Artificial Sequence
  HLA-A targeting gRNA
gggcgccgtgggtggaggagggg

SEQ ID NO: 6988 - DNA, 23 bp, Artificial Sequence
  HLA-A targeting gRNA
gggcgcctcctccgcgggtatgg

SEQ ID NO: 6989 - DNA, 23 bp, Artificial Sequence
  HLA-A targeting gRNA
gggcggattccgcagcctcgggg

SEQ ID NO: 6990 - DNA, 23 bp, Artificial Sequence
  HLA-A targeting gRNA
gggcggggcggggcggggccggg

SEQ ID NO: 6991 - DNA, 23 bp, Artificial Sequence
  HLA-A targeting gRNA
gggcggggcggggcggggctcgg

SEQ ID NO: 6992 - DNA, 23 bp, Artificial Sequence
  HLA-A targeting gRNA
gggcggggctcggggggacgggg

SEQ ID NO: 6993 - DNA, 23 bp, Artificial Sequence
  HLA-A targeting gRNA
gggcggggctcggggggactggg

SEQ ID NO: 6994 - DNA, 23 bp, Artificial Sequence
  HLA-A targeting gRNA
gggcggggggggcggggaggggg

SEQ ID NO: 6995 - DNA, 23 bp, Artificial Sequence
  HLA-A targeting gRNA
gggcggggggggggtggggtggg

SEQ ID NO: 6996 - DNA, 23 bp, Artificial Sequence
  HLA-A targeting gRNA
gggcgggggggggtggggtgggg

SEQ ID NO: 6997 - DNA, 23 bp, Artificial Sequence
  HLA-A targeting gRNA
gggcgggtcccgcggcctcaggg

SEQ ID NO: 6998 - DNA, 23 bp, Artificial Sequence
  HLA-A targeting gRNA
gggcgggtcccgcggcctcgggg

SEQ ID NO: 6999 - DNA, 23 bp, Artificial Sequence
  HLA-A targeting gRNA
gggcgggttccgcagcctcgggg

SEQ ID NO: 7000 - DNA, 23 bp, Artificial Sequence
  HLA-A targeting gRNA
gggctccatcctcggactcgcgg

SEQ ID NO: 7001 - DNA, 23 bp, Artificial Sequence
  HLA-A targeting gRNA
gggctccccacggccgggccggg

SEQ ID NO: 7002 - DNA, 23 bp, Artificial Sequence
  HLA-A targeting gRNA
gggctccccgcagccgggccggg

SEQ ID NO: 7003 - DNA, 23 bp, Artificial Sequence
  HLA-A targeting gRNA
gggctccccgcggccaggccggg

SEQ ID NO: 7004 - DNA, 23 bp, Artificial Sequence
  HLA-A targeting gRNA
gggctccccgcggccgggccagg

SEQ ID NO: 7005 - DNA, 23 bp, Artificial Sequence
  HLA-A targeting gRNA
gggctccccgctgccgggccggg

SEQ ID NO: 7006 - DNA, 23 bp, Artificial Sequence
  HLA-A targeting gRNA
gggctcccctctcggactcgcgg

SEQ ID NO: 7007 - DNA, 23 bp, Artificial Sequence
  HLA-A targeting gRNA
gggctcccctctcggacttgcgg

SEQ ID NO: 7008 - DNA, 23 bp, Artificial Sequence
  HLA-A targeting gRNA
gggctcccgagagcagcaggagg

SEQ ID NO: 7009 - DNA, 23 bp, Artificial Sequence
  HLA-A targeting gRNA
gggctccgtcctcggactcgcgg

SEQ ID NO: 7010 - DNA, 23 bp, Artificial Sequence
  HLA-A targeting gRNA
gggctctccgcggccaggccggg

SEQ ID NO: 7011 - DNA, 23 bp, Artificial Sequence
  HLA-A targeting gRNA
gggctctccgcggccgggccagg

SEQ ID NO: 7012 - DNA, 23 bp, Artificial Sequence
  HLA-A targeting gRNA
gggctctccgcggccgggcccgg

SEQ ID NO: 7013 - DNA, 23 bp, Artificial Sequence
  HLA-A targeting gRNA
gggctctccgcggccgggccggg

SEQ ID NO: 7014 - DNA, 23 bp, Artificial Sequence
  HLA-A targeting gRNA
gggctctccgcggcctggccggg

SEQ ID NO: 7015 - DNA, 23 bp, Artificial Sequence
  HLA-A targeting gRNA
gggctctccgcggctgggccggg

SEQ ID NO: 7016 - DNA, 23 bp, Artificial Sequence
  HLA-A targeting gRNA
gggctgaggcttggaggtcaggg

SEQ ID NO: 7017 - DNA, 23 bp, Artificial Sequence
  HLA-A targeting gRNA
gggctgaggcttgggggtcaggg

SEQ ID NO: 7018 - DNA, 23 bp, Artificial Sequence
  HLA-A targeting gRNA
gggctgaggcttgggtgtaaggg

SEQ ID NO: 7019 - DNA, 23 bp, Artificial Sequence
  HLA-A targeting gRNA
gggctgcctcccacttgcgctgg

SEQ ID NO: 7020 - DNA, 23 bp, Artificial Sequence
  HLA-A targeting gRNA
gggctgggtgatctgagccgcgg

SEQ ID NO: 7021 - DNA, 23 bp, Artificial Sequence
  HLA-A targeting gRNA
gggctggtgagtgcggggtcggg

SEQ ID NO: 7022 - DNA, 23 bp, Artificial Sequence
  HLA-A targeting gRNA
ggggaaaggcctgggtaatgggg

SEQ ID NO: 7023 - DNA, 23 bp, Artificial Sequence
  HLA-A targeting gRNA
ggggaccgggctgaccacggggg

SEQ ID NO: 7024 - DNA, 23 bp, Artificial Sequence
  HLA-A targeting gRNA
ggggacggggctgaccacggggg

SEQ ID NO: 7025 - DNA, 23 bp, Artificial Sequence
  HLA-A targeting gRNA
ggggacggggctgaccgcggggg

SEQ ID NO: 7026 - DNA, 23 bp, Artificial Sequence
  HLA-A targeting gRNA
ggggactgggctgaccacggggg

SEQ ID NO: 7027 - DNA, 23 bp, Artificial Sequence
  HLA-A targeting gRNA
ggggactgggctgaccgcgaggg

SEQ ID NO: 7028 - DNA, 23 bp, Artificial Sequence
  HLA-A targeting gRNA
ggggactgggctgaccgcggggg

SEQ ID NO: 7029 - DNA, 23 bp, Artificial Sequence
  HLA-A targeting gRNA
ggggagaatccgagtccgggtgg

SEQ ID NO: 7030 - DNA, 23 bp, Artificial Sequence
  HLA-A targeting gRNA
ggggagaatctgagtccgggtgg

SEQ ID NO: 7031 - DNA, 23 bp, Artificial Sequence
  HLA-A targeting gRNA
ggggagaatgtgagtccgggtgg

SEQ ID NO: 7032 - DNA, 23 bp, Artificial Sequence
  HLA-A targeting gRNA
ggggagactcggggcgacccggg

SEQ ID NO: 7033 - DNA, 23 bp, Artificial Sequence
  HLA-A targeting gRNA
ggggagactctaggcgacccggg

SEQ ID NO: 7034 - DNA, 23 bp, Artificial Sequence
  HLA-A targeting gRNA
ggggagactctgggcgacccggg

SEQ ID NO: 7035 - DNA, 23 bp, Artificial Sequence
  HLA-A targeting gRNA
ggggagccgcgcagggaggaggg

SEQ ID NO: 7036 - DNA, 23 bp, Artificial Sequence
  HLA-A targeting gRNA
ggggagccgcgcagggaggtggg

SEQ ID NO: 7037 - DNA, 23 bp, Artificial Sequence
  HLA-A targeting gRNA
ggggagccgcgccgggaggtggg

SEQ ID NO: 7038 - DNA, 23 bp, Artificial Sequence
  HLA-A targeting gRNA
ggggagccgcgccggtaggaggg

SEQ ID NO: 7039 - DNA, 23 bp, Artificial Sequence
  HLA-A targeting gRNA
ggggagcggcgcagggaggaggg

SEQ ID NO: 7040 - DNA, 23 bp, Artificial Sequence
  HLA-A targeting gRNA
ggggagcggcgcagggaggtggg

SEQ ID NO: 7041 - DNA, 23 bp, Artificial Sequence
  HLA-A targeting gRNA
ggggagggggcagaggggaaagg

SEQ ID NO: 7042 - DNA, 23 bp, Artificial Sequence
  HLA-A targeting gRNA
ggggcagagggaaaaggcctagg

SEQ ID NO: 7043 - DNA, 23 bp, Artificial Sequence
  HLA-A targeting gRNA
ggggcagagggaaaaggcctggg

SEQ ID NO: 7044 - DNA, 23 bp, Artificial Sequence
  HLA-A targeting gRNA
ggggcagaggggaaaggcctggg

SEQ ID NO: 7045 - DNA, 23 bp, Artificial Sequence
  HLA-A targeting gRNA
ggggcagagggggaaaggcctgg

SEQ ID NO: 7046 - DNA, 23 bp, Artificial Sequence
  HLA-A targeting gRNA
ggggcagtggggaaaggcctggg

SEQ ID NO: 7047 - DNA, 23 bp, Artificial Sequence
  HLA-A targeting gRNA
ggggccagagtattgggaccggg

SEQ ID NO: 7048 - DNA, 23 bp, Artificial Sequence
  HLA-A targeting gRNA
ggggccccgaccctgctgaaggg

SEQ ID NO: 7049 - DNA, 23 bp, Artificial Sequence
  HLA-A targeting gRNA
ggggccctcagaagaaactcagg

SEQ ID NO: 7050 - DNA, 23 bp, Artificial Sequence
  HLA-A targeting gRNA
ggggccctcagaggaaactcagg

SEQ ID NO: 7051 - DNA, 23 bp, Artificial Sequence
  HLA-A targeting gRNA
ggggccctcagaggaaactcggg

SEQ ID NO: 7052 - DNA, 23 bp, Artificial Sequence
  HLA-A targeting gRNA
ggggccctgaccctgctgaaggg

SEQ ID NO: 7053 - DNA, 23 bp, Artificial Sequence
  HLA-A targeting gRNA
ggggccggagtactgggaccggg

SEQ ID NO: 7054 - DNA, 23 bp, Artificial Sequence
  HLA-A targeting gRNA
ggggccggagtattaggaccggg

SEQ ID NO: 7055 - DNA, 23 bp, Artificial Sequence
  HLA-A targeting gRNA
ggggccggagtattgggaccggg

SEQ ID NO: 7056 - DNA, 23 bp, Artificial Sequence
  HLA-A targeting gRNA
ggggccggagtgttgggaccggg

SEQ ID NO: 7057 - DNA, 23 bp, Artificial Sequence
  HLA-A targeting gRNA
ggggcgaccccggccgtacgtgg

SEQ ID NO: 7058 - DNA, 23 bp, Artificial Sequence
  HLA-A targeting gRNA
ggggcgacccgggccgtacgtgg

SEQ ID NO: 7059 - DNA, 23 bp, Artificial Sequence
  HLA-A targeting gRNA
ggggcgacccgggccgtccgtgg

SEQ ID NO: 7060 - DNA, 23 bp, Artificial Sequence
  HLA-A targeting gRNA
ggggcggggagggggcagagggg

SEQ ID NO: 7061 - DNA, 23 bp, Artificial Sequence
  HLA-A targeting gRNA
ggggcggggccggggggacgggg

SEQ ID NO: 7062 - DNA, 23 bp, Artificial Sequence
  HLA-A targeting gRNA
ggggcggggcggggcggggccgg

SEQ ID NO: 7063 - DNA, 23 bp, Artificial Sequence
  HLA-A targeting gRNA
ggggcggggcggggctcgggggg

SEQ ID NO: 7064 - DNA, 23 bp, Artificial Sequence
  HLA-A targeting gRNA
ggggcggggctcgcgggacgggg

SEQ ID NO: 7065 - DNA, 23 bp, Artificial Sequence
  HLA-A targeting gRNA
ggggcggggctcgggggacgggg

SEQ ID NO: 7066 - DNA, 23 bp, Artificial Sequence
  HLA-A targeting gRNA
ggggcggggctcggggggacggg

SEQ ID NO: 7067 - DNA, 23 bp, Artificial Sequence
  HLA-A targeting gRNA
ggggcggggctcggggggactgg

SEQ ID NO: 7068 - DNA, 23 bp, Artificial Sequence
  HLA-A targeting gRNA
ggggcggggttcgggggacgggg

SEQ ID NO: 7069 - DNA, 23 bp, Artificial Sequence
  HLA-A targeting gRNA
ggggctccccacggccgggccgg

SEQ ID NO: 7070 - DNA, 23 bp, Artificial Sequence
  HLA-A targeting gRNA
ggggctccccgcagccgggccgg

SEQ ID NO: 7071 - DNA, 23 bp, Artificial Sequence
  HLA-A targeting gRNA
ggggctccccgcggccaggccgg

SEQ ID NO: 7072 - DNA, 23 bp, Artificial Sequence
  HLA-A targeting gRNA
ggggctccccgctgccgggccgg

SEQ ID NO: 7073 - DNA, 23 bp, Artificial Sequence
  HLA-A targeting gRNA
ggggctctccgcggccaggccgg

SEQ ID NO: 7074 - DNA, 23 bp, Artificial Sequence
  HLA-A targeting gRNA
ggggctctccgcggccgggccgg

SEQ ID NO: 7075 - DNA, 23 bp, Artificial Sequence
  HLA-A targeting gRNA
ggggctctccgcggcctggccgg

SEQ ID NO: 7076 - DNA, 23 bp, Artificial Sequence
  HLA-A targeting gRNA
ggggctctccgcggctgggccgg

SEQ ID NO: 7077 - DNA, 23 bp, Artificial Sequence
  HLA-A targeting gRNA
ggggctggagtattgggaccggg

SEQ ID NO: 7078 - DNA, 23 bp, Artificial Sequence
  HLA-A targeting gRNA
ggggctggggcggggctcgcggg

SEQ ID NO: 7079 - DNA, 23 bp, Artificial Sequence
  HLA-A targeting gRNA
ggggctggggcggggctcggggg

SEQ ID NO: 7080 - DNA, 23 bp, Artificial Sequence
  HLA-A targeting gRNA
ggggctggggcggggttcggggg

SEQ ID NO: 7081 - DNA, 23 bp, Artificial Sequence
  HLA-A targeting gRNA
gggggaccgggctgaccacgggg

SEQ ID NO: 7082 - DNA, 23 bp, Artificial Sequence
  HLA-A targeting gRNA
gggggacgggctgaccacggggg

SEQ ID NO: 7083 - DNA, 23 bp, Artificial Sequence
  HLA-A targeting gRNA
gggggacggggctgaccacgggg

SEQ ID NO: 7084 - DNA, 23 bp, Artificial Sequence
  HLA-A targeting gRNA
gggggacggggctgaccgcgggg

SEQ ID NO: 7085 - DNA, 23 bp, Artificial Sequence
  HLA-A targeting gRNA
gggggacggggctggccgcgggg

SEQ ID NO: 7086 - DNA, 23 bp, Artificial Sequence
  HLA-A targeting gRNA
gggggacggtgctgaccgcgggg

SEQ ID NO: 7087 - DNA, 23 bp, Artificial Sequence
  HLA-A targeting gRNA
gggggactgggctgaccacgggg

SEQ ID NO: 7088 - DNA, 23 bp, Artificial Sequence
  HLA-A targeting gRNA
gggggactgggctgaccgcgagg

SEQ ID NO: 7089 - DNA, 23 bp, Artificial Sequence
  HLA-A targeting gRNA
gggggagccgcgggcgccgtggg

SEQ ID NO: 7090 - DNA, 23 bp, Artificial Sequence
  HLA-A targeting gRNA
gggggcagaggggaaaggcctgg

SEQ ID NO: 7091 - DNA, 23 bp, Artificial Sequence
  HLA-A targeting gRNA
gggggccctcagaggaaactcgg

SEQ ID NO: 7092 - DNA, 23 bp, Artificial Sequence
  HLA-A targeting gRNA
gggggcggggagggggcagaggg

SEQ ID NO: 7093 - DNA, 23 bp, Artificial Sequence
  HLA-A targeting gRNA
ggggggacggggctgaccgcggg

SEQ ID NO: 7094 - DNA, 23 bp, Artificial Sequence
  HLA-A targeting gRNA
ggggggactgggctgaccgcggg

SEQ ID NO: 7095 - DNA, 23 bp, Artificial Sequence
  HLA-A targeting gRNA
ggggggagccgcgggcgccgtgg

SEQ ID NO: 7096 - DNA, 23 bp, Artificial Sequence
  HLA-A targeting gRNA
ggggggcggggagggggcagagg

SEQ ID NO: 7097 - DNA, 23 bp, Artificial Sequence
  HLA-A targeting gRNA
ggggggggggcagaggggaaagg

SEQ ID NO: 7098 - DNA, 23 bp, Artificial Sequence
  HLA-A targeting gRNA
ggggggggggtggggtggggagg

SEQ ID NO: 7099 - DNA, 23 bp, Artificial Sequence
  HLA-A targeting gRNA
gggggggggtggggtggggaggg

SEQ ID NO: 7100 - DNA, 23 bp, Artificial Sequence
  HLA-A targeting gRNA
ggggggggtggggtggggagggg

SEQ ID NO: 7101 - DNA, 23 bp, Artificial Sequence
  HLA-A targeting gRNA
ggggggggtggtggggcagaggg

SEQ ID NO: 7102 - DNA, 23 bp, Artificial Sequence
  HLA-A targeting gRNA
gggggggtggggtggggaggggg

SEQ ID NO: 7103 - DNA, 23 bp, Artificial Sequence
  HLA-A targeting gRNA
gggggggtggtggggcagagggg

SEQ ID NO: 7104 - DNA, 23 bp, Artificial Sequence
  HLA-A targeting gRNA
gggggtggcgggtctggggcggg

SEQ ID NO: 7105 - DNA, 23 bp, Artificial Sequence
  HLA-A targeting gRNA
gggggtggggcagagggaaaagg

SEQ ID NO: 7106 - DNA, 23 bp, Artificial Sequence
  HLA-A targeting gRNA
ggggtaaggaggggaatgggggg

SEQ ID NO: 7107 - DNA, 23 bp, Artificial Sequence
  HLA-A targeting gRNA
ggggtaaggagggggatgagggg

SEQ ID NO: 7108 - DNA, 23 bp, Artificial Sequence
  HLA-A targeting gRNA
ggggtcctgaccctgctgaaggg

SEQ ID NO: 7109 - DNA, 23 bp, Artificial Sequence
  HLA-A targeting gRNA
ggggtcgctccgcagatacctgg

SEQ ID NO: 7110 - DNA, 23 bp, Artificial Sequence
  HLA-A targeting gRNA
ggggtcgggacctgcgccccggg

SEQ ID NO: 7111 - DNA, 23 bp, Artificial Sequence
  HLA-A targeting gRNA
ggggtcgtgacctgcgccccagg

SEQ ID NO: 7112 - DNA, 23 bp, Artificial Sequence
  HLA-A targeting gRNA
ggggtctagagtgggcagggggg

SEQ ID NO: 7113 - DNA, 23 bp, Artificial Sequence
  HLA-A targeting gRNA
ggggtctagagtgggcggggggg

SEQ ID NO: 7114 - DNA, 23 bp, Artificial Sequence
  HLA-A targeting gRNA
ggggtctagagtgggtggggtgg

SEQ ID NO: 7115 - DNA, 23 bp, Artificial Sequence
  HLA-A targeting gRNA
ggggtggcaggtctgggggtggg

SEQ ID NO: 7116 - DNA, 23 bp, Artificial Sequence
  HLA-A targeting gRNA
ggggtggcgggtctggggcgggg

SEQ ID NO: 7117 - DNA, 23 bp, Artificial Sequence
  HLA-A targeting gRNA
ggggtggcgggtctggggggggg

SEQ ID NO: 7118 - DNA, 23 bp, Artificial Sequence
  HLA-A targeting gRNA
ggggtggcgggtctgggggtggg

SEQ ID NO: 7119 - DNA, 23 bp, Artificial Sequence
  HLA-A targeting gRNA
ggggtggggagggggcagagggg

SEQ ID NO: 7120 - DNA, 23 bp, Artificial Sequence
  HLA-A targeting gRNA
gggtcacatgtgtctttgggggg

SEQ ID NO: 7121 - DNA, 23 bp, Artificial Sequence
  HLA-A targeting gRNA
gggtcacgtgtgtctttgcgggg

SEQ ID NO: 7122 - DNA, 23 bp, Artificial Sequence
  HLA-A targeting gRNA
gggtcacgtgtgtctttgggggg

SEQ ID NO: 7123 - DNA, 23 bp, Artificial Sequence
  HLA-A targeting gRNA
gggtcagggctgaggcttggagg

SEQ ID NO: 7124 - DNA, 23 bp, Artificial Sequence
  HLA-A targeting gRNA
gggtcagggctgaggcttggggg

SEQ ID NO: 7125 - DNA, 23 bp, Artificial Sequence
  HLA-A targeting gRNA
gggtcccgcggcctcgggggcgg

SEQ ID NO: 7126 - DNA, 23 bp, Artificial Sequence
  HLA-A targeting gRNA
gggtccgagatccgcccccgagg

SEQ ID NO: 7127 - DNA, 23 bp, Artificial Sequence
  HLA-A targeting gRNA
gggtcctgagcccccgcctgcgg

SEQ ID NO: 7128 - DNA, 23 bp, Artificial Sequence
  HLA-A targeting gRNA
gggtcctgcgcccccgcctgcgg

SEQ ID NO: 7129 - DNA, 23 bp, Artificial Sequence
  HLA-A targeting gRNA
gggtctagagtgggcgggggggg

SEQ ID NO: 7130 - DNA, 23 bp, Artificial Sequence
  HLA-A targeting gRNA
gggtctagagtgggtgggggtgg

SEQ ID NO: 7131 - DNA, 23 bp, Artificial Sequence
  HLA-A targeting gRNA
gggtctccttcccgttctccagg

SEQ ID NO: 7132 - DNA, 23 bp, Artificial Sequence
  HLA-A targeting gRNA
gggtgccgtgacccgcatctcgg

SEQ ID NO: 7133 - DNA, 23 bp, Artificial Sequence
  HLA-A targeting gRNA
gggtggcctcatggtcagagagg

SEQ ID NO: 7134 - DNA, 23 bp, Artificial Sequence
  HLA-A targeting gRNA
gggtggcgggtctgggggggggg

SEQ ID NO: 7135 - DNA, 23 bp, Artificial Sequence
  HLA-A targeting gRNA
gggtggggagggggcagaggggg

SEQ ID NO: 7136 - DNA, 23 bp, Artificial Sequence
  HLA-A targeting gRNA
gggtgggggtggcgggtctgggg

SEQ ID NO: 7137 - DNA, 23 bp, Artificial Sequence
  HLA-A targeting gRNA
gggtggggtggcaggtctggggg

SEQ ID NO: 7138 - DNA, 23 bp, Artificial Sequence
  HLA-A targeting gRNA
gggtggggtggcgggtctggggg

SEQ ID NO: 7139 - DNA, 23 bp, Artificial Sequence
  HLA-A targeting gRNA
gggtgggtgacttcagaaccggg

SEQ ID NO: 7140 - DNA, 23 bp, Artificial Sequence
  HLA-A targeting gRNA
gggttccgcagatccaccttggg

SEQ ID NO: 7141 - DNA, 23 bp, Artificial Sequence
  HLA-A targeting gRNA
gggttgggcggggcggggcgggg

SEQ ID NO: 7142 - DNA, 23 bp, Artificial Sequence
  HLA-A targeting gRNA
gggttggtcagggcggggcgggg

SEQ ID NO: 7143 - DNA, 23 bp, Artificial Sequence
  HLA-A targeting gRNA
gggttggtcgggactggggcggg

SEQ ID NO: 7144 - DNA, 23 bp, Artificial Sequence
  HLA-A targeting gRNA
gggttggtcggggctggggcggg

SEQ ID NO: 7145 - DNA, 23 bp, Artificial Sequence
  HLA-A targeting gRNA
gggttttcttgtcccactggggg

SEQ ID NO: 7146 - DNA, 23 bp, Artificial Sequence
  HLA-A targeting gRNA
gggttttgttgtcccactggggg

SEQ ID NO: 7147 - DNA, 23 bp, Artificial Sequence
  HLA-A targeting gRNA
ggtaatggacattctttgattgg

SEQ ID NO: 7148 - DNA, 23 bp, Artificial Sequence
  HLA-A targeting gRNA
ggtaatggagattctttgattgg

SEQ ID NO: 7149 - DNA, 23 bp, Artificial Sequence
  HLA-A targeting gRNA
ggtaatggggatcctttgatagg

SEQ ID NO: 7150 - DNA, 23 bp, Artificial Sequence
  HLA-A targeting gRNA
ggtaatggggatcctttgattgg

SEQ ID NO: 7151 - DNA, 23 bp, Artificial Sequence
  HLA-A targeting gRNA
ggtaatggggattctttgattgg

SEQ ID NO: 7152 - DNA, 23 bp, Artificial Sequence
  HLA-A targeting gRNA
ggtactgcggagacgctgattgg

SEQ ID NO: 7153 - DNA, 23 bp, Artificial Sequence
  HLA-A targeting gRNA
ggtagaacaaaaaaaatacctgg

SEQ ID NO: 7154 - DNA, 23 bp, Artificial Sequence
  HLA-A targeting gRNA
ggtagggaaggggtgaagagcgg

SEQ ID NO: 7155 - DNA, 23 bp, Artificial Sequence
  HLA-A targeting gRNA
ggtagggaaggggtgaggagtgg

SEQ ID NO: 7156 - DNA, 23 bp, Artificial Sequence
  HLA-A targeting gRNA
ggtagggaaggggtgaggggtgg

SEQ ID NO: 7157 - DNA, 23 bp, Artificial Sequence
  HLA-A targeting gRNA
ggtagggaaggggtggggagtgg

SEQ ID NO: 7158 - DNA, 23 bp, Artificial Sequence
  HLA-A targeting gRNA
ggtcacagtggacacaagggtgg

SEQ ID NO: 7159 - DNA, 23 bp, Artificial Sequence
  HLA-A targeting gRNA
ggtcacagtggacacaaggttgg

SEQ ID NO: 7160 - DNA, 23 bp, Artificial Sequence
  HLA-A targeting gRNA
ggtcacagtggacacacagttgg

SEQ ID NO: 7161 - DNA, 23 bp, Artificial Sequence
  HLA-A targeting gRNA
ggtcacagtggacacgggggtgg

SEQ ID NO: 7162 - DNA, 23 bp, Artificial Sequence
  HLA-A targeting gRNA
ggtcacggtggacacgggggtgg

SEQ ID NO: 7163 - DNA, 23 bp, Artificial Sequence
  HLA-A targeting gRNA
ggtcagggcggggcggggctcgg

SEQ ID NO: 7164 - DNA, 23 bp, Artificial Sequence
  HLA-A targeting gRNA
ggtcccagccgtacatcctctgg

SEQ ID NO: 7165 - DNA, 23 bp, Artificial Sequence
  HLA-A targeting gRNA
ggtcccgcggcctcagggggcgg

SEQ ID NO: 7166 - DNA, 23 bp, Artificial Sequence
  HLA-A targeting gRNA
ggtcccggacggggctctcaggg

SEQ ID NO: 7167 - DNA, 23 bp, Artificial Sequence
  HLA-A targeting gRNA
ggtcccgggcggggctctcaggg

SEQ ID NO: 7168 - DNA, 23 bp, Artificial Sequence
  HLA-A targeting gRNA
ggtcccgggcggggctctctggg

SEQ ID NO: 7169 - DNA, 23 bp, Artificial Sequence
  HLA-A targeting gRNA
ggtcccgggcggggttctcaggg

SEQ ID NO: 7170 - DNA, 23 bp, Artificial Sequence
  HLA-A targeting gRNA
ggtccgagatccgccccctgagg

SEQ ID NO: 7171 - DNA, 23 bp, Artificial Sequence
  HLA-A targeting gRNA
ggtcctgcgccctcgccgggagg

SEQ ID NO: 7172 - DNA, 23 bp, Artificial Sequence
  HLA-A targeting gRNA
ggtcctgcgccctcgccgggcgg

SEQ ID NO: 7173 - DNA, 23 bp, Artificial Sequence
  HLA-A targeting gRNA
ggtcgcagccaaacatccactgg

SEQ ID NO: 7174 - DNA, 23 bp, Artificial Sequence
  HLA-A targeting gRNA
ggtcgcagccaaacatcctctgg

SEQ ID NO: 7175 - DNA, 23 bp, Artificial Sequence
  HLA-A targeting gRNA
ggtcgcagccacacatccactgg

SEQ ID NO: 7176 - DNA, 23 bp, Artificial Sequence
  HLA-A targeting gRNA
ggtcgcagccagacatcctctgg

SEQ ID NO: 7177 - DNA, 23 bp, Artificial Sequence
  HLA-A targeting gRNA
ggtcgcagccatacatccactgg

SEQ ID NO: 7178 - DNA, 23 bp, Artificial Sequence
  HLA-A targeting gRNA
ggtcgcagccatacatccgctgg

SEQ ID NO: 7179 - DNA, 23 bp, Artificial Sequence
  HLA-A targeting gRNA
ggtcgcagccatacatcctccgg

SEQ ID NO: 7180 - DNA, 23 bp, Artificial Sequence
  HLA-A targeting gRNA
ggtcgcagccatacatcctctgg

SEQ ID NO: 7181 - DNA, 23 bp, Artificial Sequence
  HLA-A targeting gRNA
ggtcgcagccgtacatccactgg

SEQ ID NO: 7182 - DNA, 23 bp, Artificial Sequence
  HLA-A targeting gRNA
ggtcgcagccgtacatcctctgg

SEQ ID NO: 7183 - DNA, 23 bp, Artificial Sequence
  HLA-A targeting gRNA
ggtcgcagccgtacatgctctgg

SEQ ID NO: 7184 - DNA, 23 bp, Artificial Sequence
  HLA-A targeting gRNA
ggtcggggcggggcggggcgggg

SEQ ID NO: 7185 - DNA, 23 bp, Artificial Sequence
  HLA-A targeting gRNA
ggtctagagtgggcggggggggg

SEQ ID NO: 7186 - DNA, 23 bp, Artificial Sequence
  HLA-A targeting gRNA
ggtgacctcatggtcagagatgg

SEQ ID NO: 7187 - DNA, 23 bp, Artificial Sequence
  HLA-A targeting gRNA
ggtgatgtatggctgcgacgtgg

SEQ ID NO: 7188 - DNA, 23 bp, Artificial Sequence
  HLA-A targeting gRNA
ggtgcccaaggctgctgcagggg

SEQ ID NO: 7189 - DNA, 23 bp, Artificial Sequence
  HLA-A targeting gRNA
ggtgccggaggattgggaccggg

SEQ ID NO: 7190 - DNA, 23 bp, Artificial Sequence
  HLA-A targeting gRNA
ggtgctctccgcggccaggccgg

SEQ ID NO: 7191 - DNA, 23 bp, Artificial Sequence
  HLA-A targeting gRNA
ggtgcttccagtaacaaggcggg

SEQ ID NO: 7192 - DNA, 23 bp, Artificial Sequence
  HLA-A targeting gRNA
ggtgcttccagtaacgaggtggg

SEQ ID NO: 7193 - DNA, 23 bp, Artificial Sequence
  HLA-A targeting gRNA
ggtggcctcatggtcagagacgg

SEQ ID NO: 7194 - DNA, 23 bp, Artificial Sequence
  HLA-A targeting gRNA
ggtggcctcatggtcagagaggg

SEQ ID NO: 7195 - DNA, 23 bp, Artificial Sequence
  HLA-A targeting gRNA
ggtggcgggtctggggggggggg

SEQ ID NO: 7196 - DNA, 23 bp, Artificial Sequence
  HLA-A targeting gRNA
ggtggggcacacttctacctggg

SEQ ID NO: 7197 - DNA, 23 bp, Artificial Sequence
  HLA-A targeting gRNA
ggtggggtggcgggtctgggggg

SEQ ID NO: 7198 - DNA, 23 bp, Artificial Sequence
  HLA-A targeting gRNA
ggtgggtcacatgtgtctttggg

SEQ ID NO: 7199 - DNA, 23 bp, Artificial Sequence
  HLA-A targeting gRNA
ggtgggtcacgtgtgtctttggg

SEQ ID NO: 7200 - DNA, 23 bp, Artificial Sequence
  HLA-A targeting gRNA
ggtgggtgagctcctccacacgg

SEQ ID NO: 7201 - DNA, 23 bp, Artificial Sequence
  HLA-A targeting gRNA
ggtggtggggcagaggggaaagg

SEQ ID NO: 7202 - DNA, 23 bp, Artificial Sequence
  HLA-A targeting gRNA
ggtgtagatacctcatggagtgg

SEQ ID NO: 7203 - DNA, 23 bp, Artificial Sequence
  HLA-A targeting gRNA
ggtgtcgtccacgtagcccacgg

SEQ ID NO: 7204 - DNA, 23 bp, Artificial Sequence
  HLA-A targeting gRNA
ggttccatctcctgctcgcctgg

SEQ ID NO: 7205 - DNA, 23 bp, Artificial Sequence
  HLA-A targeting gRNA
ggttccatctcctgctggcctgg

SEQ ID NO: 7206 - DNA, 23 bp, Artificial Sequence
  HLA-A targeting gRNA
ggttcccaaggctgctgcagggg

SEQ ID NO: 7207 - DNA, 23 bp, Artificial Sequence
  HLA-A targeting gRNA
ggttccgcagatccaccttgggg

SEQ ID NO: 7208 - DNA, 23 bp, Artificial Sequence
  HLA-A targeting gRNA
ggttctatctcctgcaggtctgg

SEQ ID NO: 7209 - DNA, 23 bp, Artificial Sequence
  HLA-A targeting gRNA
ggttctatctcctgccggtctgg

SEQ ID NO: 7210 - DNA, 23 bp, Artificial Sequence
  HLA-A targeting gRNA
ggttctatctcctgctggtctgg

SEQ ID NO: 7211 - DNA, 23 bp, Artificial Sequence
  HLA-A targeting gRNA
ggttctgtctcctgctggtctgg

SEQ ID NO: 7212 - DNA, 23 bp, Artificial Sequence
  HLA-A targeting gRNA
ggttgcagccacacatccactgg

SEQ ID NO: 7213 - DNA, 23 bp, Artificial Sequence
  HLA-A targeting gRNA
ggttgggagaagtgaaactcagg

SEQ ID NO: 7214 - DNA, 23 bp, Artificial Sequence
  HLA-A targeting gRNA
ggttggtcgggactggggcgggg

SEQ ID NO: 7215 - DNA, 23 bp, Artificial Sequence
  HLA-A targeting gRNA
ggttggtcggggctggggcgggg

SEQ ID NO: 7216 - DNA, 23 bp, Artificial Sequence
  HLA-A targeting gRNA
ggtttaggccaaaatccccgcgg

SEQ ID NO: 7217 - DNA, 23 bp, Artificial Sequence
  HLA-A targeting gRNA
gtaaagtgactcaaaagtgctgg

SEQ ID NO: 7218 - DNA, 23 bp, Artificial Sequence
  HLA-A targeting gRNA
gtaaagtgactcagaagtgctgg

SEQ ID NO: 7219 - DNA, 23 bp, Artificial Sequence
  HLA-A targeting gRNA
gtaacccactgagatgaagcggg

SEQ ID NO: 7220 - DNA, 23 bp, Artificial Sequence
  HLA-A targeting gRNA
gtaagccttgccgtcgtaggcgg

SEQ ID NO: 7221 - DNA, 23 bp, Artificial Sequence
  HLA-A targeting gRNA
gtaagcgatgacactctgaacgg

SEQ ID NO: 7222 - DNA, 23 bp, Artificial Sequence
  HLA-A targeting gRNA
gtaaggctgcgacgtggggccgg

SEQ ID NO: 7223 - DNA, 23 bp, Artificial Sequence
  HLA-A targeting gRNA
gtaagtctgtgtgttggtcttgg

SEQ ID NO: 7224 - DNA, 23 bp, Artificial Sequence
  HLA-A targeting gRNA
gtaagtgatgacactctgaacgg

SEQ ID NO: 7225 - DNA, 23 bp, Artificial Sequence
  HLA-A targeting gRNA
gtaagtgatgacattctgaacgg

SEQ ID NO: 7226 - DNA, 23 bp, Artificial Sequence
  HLA-A targeting gRNA
gtaatccttgccgtcctaggcgg

SEQ ID NO: 7227 - DNA, 23 bp, Artificial Sequence
  HLA-A targeting gRNA
gtaatccttgccgtcgcaggcgg

SEQ ID NO: 7228 - DNA, 23 bp, Artificial Sequence
  HLA-A targeting gRNA
gtaatccttgccgtcgtaggcgg

SEQ ID NO: 7229 - DNA, 23 bp, Artificial Sequence
  HLA-A targeting gRNA
gtaatccttgccgtcttaggcgg

SEQ ID NO: 7230 - DNA, 23 bp, Artificial Sequence
  HLA-A targeting gRNA
gtaatggacattctttgattggg

SEQ ID NO: 7231 - DNA, 23 bp, Artificial Sequence
  HLA-A targeting gRNA
gtaatggagattctttgattggg

SEQ ID NO: 7232 - DNA, 23 bp, Artificial Sequence
  HLA-A targeting gRNA
gtaatggggatcctttgataggg

SEQ ID NO: 7233 - DNA, 23 bp, Artificial Sequence
  HLA-A targeting gRNA
gtaatggggatcctttgattggg

SEQ ID NO: 7234 - DNA, 23 bp, Artificial Sequence
  HLA-A targeting gRNA
gtaatggggattctttgattggg

SEQ ID NO: 7235 - DNA, 23 bp, Artificial Sequence
  HLA-A targeting gRNA
gtacggctgcgacctggggccgg

SEQ ID NO: 7236 - DNA, 23 bp, Artificial Sequence
  HLA-A targeting gRNA
gtacggctgcgacgtggggccgg

SEQ ID NO: 7237 - DNA, 23 bp, Artificial Sequence
  HLA-A targeting gRNA
gtacgtctgtgtgttggtcttgg

SEQ ID NO: 7238 - DNA, 23 bp, Artificial Sequence
  HLA-A targeting gRNA
gtagaaatacctcaaggagtggg

SEQ ID NO: 7239 - DNA, 23 bp, Artificial Sequence
  HLA-A targeting gRNA
gtagaaatacctcatgaagtggg

SEQ ID NO: 7240 - DNA, 23 bp, Artificial Sequence
  HLA-A targeting gRNA
gtagaaatacctcatggagaggg

SEQ ID NO: 7241 - DNA, 23 bp, Artificial Sequence
  HLA-A targeting gRNA
gtagaaatacttcatggagtggg

SEQ ID NO: 7242 - DNA, 23 bp, Artificial Sequence
  HLA-A targeting gRNA
gtagaacaaaaaaaaagacctgg

SEQ ID NO: 7243 - DNA, 23 bp, Artificial Sequence
  HLA-A targeting gRNA
gtagcccacggtaatgaagcggg

SEQ ID NO: 7244 - DNA, 23 bp, Artificial Sequence
  HLA-A targeting gRNA
gtagcccacggtgatgaagcggg

SEQ ID NO: 7245 - DNA, 23 bp, Artificial Sequence
  HLA-A targeting gRNA
gtagcccactgagacgaagcggg

SEQ ID NO: 7246 - DNA, 23 bp, Artificial Sequence
  HLA-A targeting gRNA
gtagcccactgagatgaagcggg

SEQ ID NO: 7247 - DNA, 23 bp, Artificial Sequence
  HLA-A targeting gRNA
gtagcccactgcaatgaagcggg

SEQ ID NO: 7248 - DNA, 23 bp, Artificial Sequence
  HLA-A targeting gRNA
gtagcccactgcgatgaagtggg

SEQ ID NO: 7249 - DNA, 23 bp, Artificial Sequence
  HLA-A targeting gRNA
gtagcgcactgagatgaagcggg

SEQ ID NO: 7250 - DNA, 23 bp, Artificial Sequence
  HLA-A targeting gRNA
gtaggaggaagagctcaggtagg

SEQ ID NO: 7251 - DNA, 23 bp, Artificial Sequence
  HLA-A targeting gRNA
gtaggaggaagagttcaggtagg

SEQ ID NO: 7252 - DNA, 23 bp, Artificial Sequence
  HLA-A targeting gRNA
gtaggaggaagagttctggtagg

SEQ ID NO: 7253 - DNA, 23 bp, Artificial Sequence
  HLA-A targeting gRNA
gtaggctgggaagatggctctgg

SEQ ID NO: 7254 - DNA, 23 bp, Artificial Sequence
  HLA-A targeting gRNA
gtagggaaggggtgaagagcggg

SEQ ID NO: 7255 - DNA, 23 bp, Artificial Sequence
  HLA-A targeting gRNA
gtagggaaggggtgaggagtggg

SEQ ID NO: 7256 - DNA, 23 bp, Artificial Sequence
  HLA-A targeting gRNA
gtagggaaggggtgaggggtggg

SEQ ID NO: 7257 - DNA, 23 bp, Artificial Sequence
  HLA-A targeting gRNA
gtagggaaggggtggggagtggg

SEQ ID NO: 7258 - DNA, 23 bp, Artificial Sequence
  HLA-A targeting gRNA
gtagttctggaaacttctcttgg

SEQ ID NO: 7259 - DNA, 23 bp, Artificial Sequence
  HLA-A targeting gRNA
gtatctacaccgccgtgtcccgg

SEQ ID NO: 7260 - DNA, 23 bp, Artificial Sequence
  HLA-A targeting gRNA
gtatggctgcgacatggggccgg

SEQ ID NO: 7261 - DNA, 23 bp, Artificial Sequence
  HLA-A targeting gRNA
gtatggctgcgacctggggccgg

SEQ ID NO: 7262 - DNA, 23 bp, Artificial Sequence
  HLA-A targeting gRNA
gtatggctgcgacgtggagccgg

SEQ ID NO: 7263 - DNA, 23 bp, Artificial Sequence
  HLA-A targeting gRNA
gtcacagtggacacaagggtggg

SEQ ID NO: 7264 - DNA, 23 bp, Artificial Sequence
  HLA-A targeting gRNA
gtcacagtggacacaaggttggg

SEQ ID NO: 7265 - DNA, 23 bp, Artificial Sequence
  HLA-A targeting gRNA
gtcacagtggacacacagttggg

SEQ ID NO: 7266 - DNA, 23 bp, Artificial Sequence
  HLA-A targeting gRNA
gtcacagtggacacgggggtggg

SEQ ID NO: 7267 - DNA, 23 bp, Artificial Sequence
  HLA-A targeting gRNA
gtcacgagtatcccggaagaagg

SEQ ID NO: 7268 - DNA, 23 bp, Artificial Sequence
  HLA-A targeting gRNA
gtcacgagtatcctggaagaagg

SEQ ID NO: 7269 - DNA, 23 bp, Artificial Sequence
  HLA-A targeting gRNA
gtcacggtggacacgggggtggg

SEQ ID NO: 7270 - DNA, 23 bp, Artificial Sequence
  HLA-A targeting gRNA
gtcactcaccggcctcgctccgg

SEQ ID NO: 7271 - DNA, 23 bp, Artificial Sequence
  HLA-A targeting gRNA
gtcactcaccggtctcgctctgg

SEQ ID NO: 7272 - DNA, 23 bp, Artificial Sequence
  HLA-A targeting gRNA
gtcactcaccgtcctcgctccgg

SEQ ID NO: 7273 - DNA, 23 bp, Artificial Sequence
  HLA-A targeting gRNA
gtcactcacggtcctcgctctgg

SEQ ID NO: 7274 - DNA, 23 bp, Artificial Sequence
  HLA-A targeting gRNA
gtcactcactggcctcgctctgg

SEQ ID NO: 7275 - DNA, 23 bp, Artificial Sequence
  HLA-A targeting gRNA
gtcagagcccacaggagacgtgg

SEQ ID NO: 7276 - DNA, 23 bp, Artificial Sequence
  HLA-A targeting gRNA
gtcagagcccacaggagatgtgg

SEQ ID NO: 7277 - DNA, 23 bp, Artificial Sequence
  HLA-A targeting gRNA
gtcagagcccgcaggagacgtgg

SEQ ID NO: 7278 - DNA, 23 bp, Artificial Sequence
  HLA-A targeting gRNA
gtcagagcccgcaggagatgtgg

SEQ ID NO: 7279 - DNA, 23 bp, Artificial Sequence
  HLA-A targeting gRNA
gtcagagccctcaggagacgtgg

SEQ ID NO: 7280 - DNA, 23 bp, Artificial Sequence
  HLA-A targeting gRNA
gtcagggccatgcgatcttaggg

SEQ ID NO: 7281 - DNA, 23 bp, Artificial Sequence
  HLA-A targeting gRNA
gtcagggcggggcggggctcggg

SEQ ID NO: 7282 - DNA, 23 bp, Artificial Sequence
  HLA-A targeting gRNA
gtcagtctgtgtgttggtcttgg

SEQ ID NO: 7283 - DNA, 23 bp, Artificial Sequence
  HLA-A targeting gRNA
gtcatgagtattcaggaagaagg

SEQ ID NO: 7284 - DNA, 23 bp, Artificial Sequence
  HLA-A targeting gRNA
gtcccaggctgggatggcccagg

SEQ ID NO: 7285 - DNA, 23 bp, Artificial Sequence
  HLA-A targeting gRNA
gtcccgcggcctcagggaggcgg

SEQ ID NO: 7286 - DNA, 23 bp, Artificial Sequence
  HLA-A targeting gRNA
gtcccgcggcctcaggggggcgg

SEQ ID NO: 7287 - DNA, 23 bp, Artificial Sequence
  HLA-A targeting gRNA
gtcccgcggcctcaggggggtgg

SEQ ID NO: 7288 - DNA, 23 bp, Artificial Sequence
  HLA-A targeting gRNA
gtcccgcggcctcagggggtcgg

SEQ ID NO: 7289 - DNA, 23 bp, Artificial Sequence
  HLA-A targeting gRNA
gtccctagaatactgatcagggg

SEQ ID NO: 7290 - DNA, 23 bp, Artificial Sequence
  HLA-A targeting gRNA
gtccctaggatagtgatcagggg

SEQ ID NO: 7291 - DNA, 23 bp, Artificial Sequence
  HLA-A targeting gRNA
gtccctataatactgatcagggg

SEQ ID NO: 7292 - DNA, 23 bp, Artificial Sequence
  HLA-A targeting gRNA
gtccctggaatactgatcagggg

SEQ ID NO: 7293 - DNA, 23 bp, Artificial Sequence
  HLA-A targeting gRNA
gtccctgttagcataatgtgagg

SEQ ID NO: 7294 - DNA, 23 bp, Artificial Sequence
  HLA-A targeting gRNA
gtccctgttagcctaatgtgagg

SEQ ID NO: 7295 - DNA, 23 bp, Artificial Sequence
  HLA-A targeting gRNA
gtccgagatccacccccctgagg

SEQ ID NO: 7296 - DNA, 23 bp, Artificial Sequence
  HLA-A targeting gRNA
gtccgagatccgaccccctgagg

SEQ ID NO: 7297 - DNA, 23 bp, Artificial Sequence
  HLA-A targeting gRNA
gtccgagatccgcccccctgagg

SEQ ID NO: 7298 - DNA, 23 bp, Artificial Sequence
  HLA-A targeting gRNA
gtccgagatccgcctccctgagg

SEQ ID NO: 7299 - DNA, 23 bp, Artificial Sequence
  HLA-A targeting gRNA
gtcctagcagttgtggtcatcgg

SEQ ID NO: 7300 - DNA, 23 bp, Artificial Sequence
  HLA-A targeting gRNA
gtcctccccatcccactgccagg

SEQ ID NO: 7301 - DNA, 23 bp, Artificial Sequence
  HLA-A targeting gRNA
gtcctcgccatcccgctaccagg

SEQ ID NO: 7302 - DNA, 23 bp, Artificial Sequence
  HLA-A targeting gRNA
gtcctcgccatcccgctgccagg

SEQ ID NO: 7303 - DNA, 23 bp, Artificial Sequence
  HLA-A targeting gRNA
gtcctgcgccctcgccgggaggg

SEQ ID NO: 7304 - DNA, 23 bp, Artificial Sequence
  HLA-A targeting gRNA
gtcctgcgccctcgccgggcggg

SEQ ID NO: 7305 - DNA, 23 bp, Artificial Sequence
  HLA-A targeting gRNA
gtccttgccatcccgctgccagg

SEQ ID NO: 7306 - DNA, 23 bp, Artificial Sequence
  HLA-A targeting gRNA
gtcgaaatacctcatggagtggg

SEQ ID NO: 7307 - DNA, 23 bp, Artificial Sequence
  HLA-A targeting gRNA
gtcgggactggggcggggctcgg

SEQ ID NO: 7308 - DNA, 23 bp, Artificial Sequence
  HLA-A targeting gRNA
gtcggggctggggcggggctcgg

SEQ ID NO: 7309 - DNA, 23 bp, Artificial Sequence
  HLA-A targeting gRNA
gtcggggctggggcggggttcgg

SEQ ID NO: 7310 - DNA, 23 bp, Artificial Sequence
  HLA-A targeting gRNA
gtctagagtgggcaggggggtgg

SEQ ID NO: 7311 - DNA, 23 bp, Artificial Sequence
  HLA-A targeting gRNA
gtctagagtgggcgggggggcgg

SEQ ID NO: 7312 - DNA, 23 bp, Artificial Sequence
  HLA-A targeting gRNA
gtctagagtgggcgggggggggg

SEQ ID NO: 7313 - DNA, 23 bp, Artificial Sequence
  HLA-A targeting gRNA
gtctagagtgggtggggtggcgg

SEQ ID NO: 7314 - DNA, 23 bp, Artificial Sequence
  HLA-A targeting gRNA
gtctcccggtcccaacactccgg

SEQ ID NO: 7315 - DNA, 23 bp, Artificial Sequence
  HLA-A targeting gRNA
gtctcccggtcccaatactccgg

SEQ ID NO: 7316 - DNA, 23 bp, Artificial Sequence
  HLA-A targeting gRNA
gtctcccggtcccaatactctgg

SEQ ID NO: 7317 - DNA, 23 bp, Artificial Sequence
  HLA-A targeting gRNA
gtctcccggtcccaatcctccgg

SEQ ID NO: 7318 - DNA, 23 bp, Artificial Sequence
  HLA-A targeting gRNA
gtctcccggtcccagtactccgg

SEQ ID NO: 7319 - DNA, 23 bp, Artificial Sequence
  HLA-A targeting gRNA
gtctcccggtcctaatactccgg

SEQ ID NO: 7320 - DNA, 23 bp, Artificial Sequence
  HLA-A targeting gRNA
gtctcctgagggctctgaccagg

SEQ ID NO: 7321 - DNA, 23 bp, Artificial Sequence
  HLA-A targeting gRNA
gtctcctgcgggctctgaccagg

SEQ ID NO: 7322 - DNA, 23 bp, Artificial Sequence
  HLA-A targeting gRNA
gtctcctgtgggctctgaccagg

SEQ ID NO: 7323 - DNA, 23 bp, Artificial Sequence
  HLA-A targeting gRNA
gtctgagatccaccccaaggtgg

SEQ ID NO: 7324 - DNA, 23 bp, Artificial Sequence
  HLA-A targeting gRNA
gtctgaggagactctgagtccgg

SEQ ID NO: 7325 - DNA, 23 bp, Artificial Sequence
  HLA-A targeting gRNA
gtctgaggagattctgagtccgg

SEQ ID NO: 7326 - DNA, 23 bp, Artificial Sequence
  HLA-A targeting gRNA
gtctgaggagattttgagtccgg

SEQ ID NO: 7327 - DNA, 23 bp, Artificial Sequence
  HLA-A targeting gRNA
gtctgccaagtgtgagaccctgg

SEQ ID NO: 7328 - DNA, 23 bp, Artificial Sequence
  HLA-A targeting gRNA
gtctggagggtgtgagaccctgg

SEQ ID NO: 7329 - DNA, 23 bp, Artificial Sequence
  HLA-A targeting gRNA
gtctggctgcgacgtggggccgg

SEQ ID NO: 7330 - DNA, 23 bp, Artificial Sequence
  HLA-A targeting gRNA
gtctggggagaatccgagtccgg

SEQ ID NO: 7331 - DNA, 23 bp, Artificial Sequence
  HLA-A targeting gRNA
gtctggggagaatctgagtccgg

SEQ ID NO: 7332 - DNA, 23 bp, Artificial Sequence
  HLA-A targeting gRNA
gtcttccccatcccgctgccagg

SEQ ID NO: 7333 - DNA, 23 bp, Artificial Sequence
  HLA-A targeting gRNA
gtcttcccctccatttcctcagg

SEQ ID NO: 7334 - DNA, 23 bp, Artificial Sequence
  HLA-A targeting gRNA
gtcttgaagatctgtgtgttcgg

SEQ ID NO: 7335 - DNA, 23 bp, Artificial Sequence
  HLA-A targeting gRNA
gtgaacctgcggaaactgcgcgg

SEQ ID NO: 7336 - DNA, 23 bp, Artificial Sequence
  HLA-A targeting gRNA
gtgaacctgcggaacctgcgcgg

SEQ ID NO: 7337 - DNA, 23 bp, Artificial Sequence
  HLA-A targeting gRNA
gtgaacctgcggcaactgcgcgg

SEQ ID NO: 7338 - DNA, 23 bp, Artificial Sequence
  HLA-A targeting gRNA
gtgaccagcctgagaatggacgg

SEQ ID NO: 7339 - DNA, 23 bp, Artificial Sequence
  HLA-A targeting gRNA
gtgaccccggcctggggcgcagg

SEQ ID NO: 7340 - DNA, 23 bp, Artificial Sequence
  HLA-A targeting gRNA
gtgacctcatggtcagagatggg

SEQ ID NO: 7341 - DNA, 23 bp, Artificial Sequence
  HLA-A targeting gRNA
gtgacctgcgccccaggccgggg

SEQ ID NO: 7342 - DNA, 23 bp, Artificial Sequence
  HLA-A targeting gRNA
gtgactggggacttcagaaccgg

SEQ ID NO: 7343 - DNA, 23 bp, Artificial Sequence
  HLA-A targeting gRNA
gtgactggggactttagaaccgg

SEQ ID NO: 7344 - DNA, 23 bp, Artificial Sequence
  HLA-A targeting gRNA
gtgactggtgactttagaaccgg

SEQ ID NO: 7345 - DNA, 23 bp, Artificial Sequence
  HLA-A targeting gRNA
gtgagcctgcggaaactgcgcgg

SEQ ID NO: 7346 - DNA, 23 bp, Artificial Sequence
  HLA-A targeting gRNA
gtgagcctgcggaacctgcgcgg

SEQ ID NO: 7347 - DNA, 23 bp, Artificial Sequence
  HLA-A targeting gRNA
gtgagcctgcggaacctgcttgg

SEQ ID NO: 7348 - DNA, 23 bp, Artificial Sequence
  HLA-A targeting gRNA
gtgagtccgggtgggtgactggg

SEQ ID NO: 7349 - DNA, 23 bp, Artificial Sequence
  HLA-A targeting gRNA
gtgatgtatggctgcgacgtggg

SEQ ID NO: 7350 - DNA, 23 bp, Artificial Sequence
  HLA-A targeting gRNA
gtgcgaggttgggagggaaacgg

SEQ ID NO: 7351 - DNA, 23 bp, Artificial Sequence
  HLA-A targeting gRNA
gtgcgggatcgggagggaaatgg

SEQ ID NO: 7352 - DNA, 23 bp, Artificial Sequence
  HLA-A targeting gRNA
gtgcggggtcggcagggaaatgg

SEQ ID NO: 7353 - DNA, 23 bp, Artificial Sequence
  HLA-A targeting gRNA
gtgcggggtcgggagggaaatgg

SEQ ID NO: 7354 - DNA, 23 bp, Artificial Sequence
  HLA-A targeting gRNA
gtgcggggttaggagggaaacgg

SEQ ID NO: 7355 - DNA, 23 bp, Artificial Sequence
  HLA-A targeting gRNA
gtgcggggttgggagggaaacgg

SEQ ID NO: 7356 - DNA, 23 bp, Artificial Sequence
  HLA-A targeting gRNA
gtgcggggttgggagggaagcgg

SEQ ID NO: 7357 - DNA, 23 bp, Artificial Sequence
  HLA-A targeting gRNA
gtgcggggttgggagggaatcgg

SEQ ID NO: 7358 - DNA, 23 bp, Artificial Sequence
  HLA-A targeting gRNA
gtgcgtggggactttagaactgg

SEQ ID NO: 7359 - DNA, 23 bp, Artificial Sequence
  HLA-A targeting gRNA
gtgctagcacacagggtcccagg

SEQ ID NO: 7360 - DNA, 23 bp, Artificial Sequence
  HLA-A targeting gRNA
gtgctctccgcggccaggccggg

SEQ ID NO: 7361 - DNA, 23 bp, Artificial Sequence
  HLA-A targeting gRNA
gtgctggcacacagggccccagg

SEQ ID NO: 7362 - DNA, 23 bp, Artificial Sequence
  HLA-A targeting gRNA
gtgctggcacacagggtcccagg

SEQ ID NO: 7363 - DNA, 23 bp, Artificial Sequence
  HLA-A targeting gRNA
gtgctgggtgatctgagccgcgg

SEQ ID NO: 7364 - DNA, 23 bp, Artificial Sequence
  HLA-A targeting gRNA
gtgcttccagtaacaaggcgggg

SEQ ID NO: 7365 - DNA, 23 bp, Artificial Sequence
  HLA-A targeting gRNA
gtgcttccagtaacgaggtgggg

SEQ ID NO: 7366 - DNA, 23 bp, Artificial Sequence
  HLA-A targeting gRNA
gtggaaatacctcatggagtggg

SEQ ID NO: 7367 - DNA, 23 bp, Artificial Sequence
  HLA-A targeting gRNA
gtggaagcctgggggcgaggagg

SEQ ID NO: 7368 - DNA, 23 bp, Artificial Sequence
  HLA-A targeting gRNA
gtggactgggaagacggctccgg

SEQ ID NO: 7369 - DNA, 23 bp, Artificial Sequence
  HLA-A targeting gRNA
gtggactgggaagacggctctgg

SEQ ID NO: 7370 - DNA, 23 bp, Artificial Sequence
  HLA-A targeting gRNA
gtggactgggaagatggctctgg

SEQ ID NO: 7371 - DNA, 23 bp, Artificial Sequence
  HLA-A targeting gRNA
gtggagcaggaggggccggacgg

SEQ ID NO: 7372 - DNA, 23 bp, Artificial Sequence
  HLA-A targeting gRNA
gtggatagagcaagaggggccgg

SEQ ID NO: 7373 - DNA, 23 bp, Artificial Sequence
  HLA-A targeting gRNA
gtggatggagcaggaggggccgg

SEQ ID NO: 7374 - DNA, 23 bp, Artificial Sequence
  HLA-A targeting gRNA
gtggatgtacggctgcgacctgg

SEQ ID NO: 7375 - DNA, 23 bp, Artificial Sequence
  HLA-A targeting gRNA
gtggatgtatggctgcgacctgg

SEQ ID NO: 7376 - DNA, 23 bp, Artificial Sequence
  HLA-A targeting gRNA
gtggatgtatggctgcgacgtgg

SEQ ID NO: 7377 - DNA, 23 bp, Artificial Sequence
  HLA-A targeting gRNA
gtggatgtgtggctgcaacctgg

SEQ ID NO: 7378 - DNA, 23 bp, Artificial Sequence
  HLA-A targeting gRNA
gtggatgtgtggctgcgacctgg

SEQ ID NO: 7379 - DNA, 23 bp, Artificial Sequence
  HLA-A targeting gRNA
gtggatgtttggctgcgacctgg

SEQ ID NO: 7380 - DNA, 23 bp, Artificial Sequence
  HLA-A targeting gRNA
gtggattgggaagatggctctgg

SEQ ID NO: 7381 - DNA, 23 bp, Artificial Sequence
  HLA-A targeting gRNA
gtggcaggtctgggggtgggtgg

SEQ ID NO: 7382 - DNA, 23 bp, Artificial Sequence
  HLA-A targeting gRNA
gtggcctcatggtcagagacggg

SEQ ID NO: 7383 - DNA, 23 bp, Artificial Sequence
  HLA-A targeting gRNA
gtggcctcatggtcagagagggg

SEQ ID NO: 7384 - DNA, 23 bp, Artificial Sequence
  HLA-A targeting gRNA
gtggcgggtctggggcggggtgg

SEQ ID NO: 7385 - DNA, 23 bp, Artificial Sequence
  HLA-A targeting gRNA
gtggcgggtctgggggggggggg

SEQ ID NO: 7386 - DNA, 23 bp, Artificial Sequence
  HLA-A targeting gRNA
gtggcgggtctgggggtgggtgg

SEQ ID NO: 7387 - DNA, 23 bp, Artificial Sequence
  HLA-A targeting gRNA
gtgggaacctgggggcgaggagg

SEQ ID NO: 7388 - DNA, 23 bp, Artificial Sequence
  HLA-A targeting gRNA
gtgggacaagaggaattatgggg

SEQ ID NO: 7389 - DNA, 23 bp, Artificial Sequence
  HLA-A targeting gRNA
gtgggacaggaggaattaggggg

SEQ ID NO: 7390 - DNA, 23 bp, Artificial Sequence
  HLA-A targeting gRNA
gtgggacaggaggaattatgggg

SEQ ID NO: 7391 - DNA, 23 bp, Artificial Sequence
  HLA-A targeting gRNA
gtgggagactgggggcgaggagg

SEQ ID NO: 7392 - DNA, 23 bp, Artificial Sequence
  HLA-A targeting gRNA
gtgggagactgggggtgaggagg

SEQ ID NO: 7393 - DNA, 23 bp, Artificial Sequence
  HLA-A targeting gRNA
gtgggagcctgggagcgaggagg

SEQ ID NO: 7394 - DNA, 23 bp, Artificial Sequence
  HLA-A targeting gRNA
gtgggagcctggggcaaggaggg

SEQ ID NO: 7395 - DNA, 23 bp, Artificial Sequence
  HLA-A targeting gRNA
gtgggagcctgggggagaggagg

SEQ ID NO: 7396 - DNA, 23 bp, Artificial Sequence
  HLA-A targeting gRNA
gtgggagcctgggggccaggagg

SEQ ID NO: 7397 - DNA, 23 bp, Artificial Sequence
  HLA-A targeting gRNA
gtgggagcctgggggcgaggagg

SEQ ID NO: 7398 - DNA, 23 bp, Artificial Sequence
  HLA-A targeting gRNA
gtgggagcctgggggtgaggagg

SEQ ID NO: 7399 - DNA, 23 bp, Artificial Sequence
  HLA-A targeting gRNA
gtgggaggcagcccgtgaggcgg

SEQ ID NO: 7400 - DNA, 23 bp, Artificial Sequence
  HLA-A targeting gRNA
gtgggaggcggcccgggtggcgg

SEQ ID NO: 7401 - DNA, 23 bp, Artificial Sequence
  HLA-A targeting gRNA
gtgggaggcggcccgtacggcgg

SEQ ID NO: 7402 - DNA, 23 bp, Artificial Sequence
  HLA-A targeting gRNA
gtgggaggcggcccgtatggcgg

SEQ ID NO: 7403 - DNA, 23 bp, Artificial Sequence
  HLA-A targeting gRNA
gtgggaggcggcccgtgaggcgg

SEQ ID NO: 7404 - DNA, 23 bp, Artificial Sequence
  HLA-A targeting gRNA
gtgggaggcggcccgtgcggcgg

SEQ ID NO: 7405 - DNA, 23 bp, Artificial Sequence
  HLA-A targeting gRNA
gtgggaggcggccggtgaggcgg

SEQ ID NO: 7406 - DNA, 23 bp, Artificial Sequence
  HLA-A targeting gRNA
gtgggaggcggcctgtgaggcgg

SEQ ID NO: 7407 - DNA, 23 bp, Artificial Sequence
  HLA-A targeting gRNA
gtgggaggcggctcgtgaggcgg

SEQ ID NO: 7408 - DNA, 23 bp, Artificial Sequence
  HLA-A targeting gRNA
gtgggaggctgggggcgaggagg

SEQ ID NO: 7409 - DNA, 23 bp, Artificial Sequence
  HLA-A targeting gRNA
gtgggcctgcggaacctgcgcgg

SEQ ID NO: 7410 - DNA, 23 bp, Artificial Sequence
  HLA-A targeting gRNA
gtgggcgggggggcggggagggg

SEQ ID NO: 7411 - DNA, 23 bp, Artificial Sequence
  HLA-A targeting gRNA
gtgggcggggggggcggggaggg

SEQ ID NO: 7412 - DNA, 23 bp, Artificial Sequence
  HLA-A targeting gRNA
gtgggcgggggggggtggggtgg

SEQ ID NO: 7413 - DNA, 23 bp, Artificial Sequence
  HLA-A targeting gRNA
gtgggcggggggggtggggtggg

SEQ ID NO: 7414 - DNA, 23 bp, Artificial Sequence
  HLA-A targeting gRNA
gtgggctgggaagatggccctgg

SEQ ID NO: 7415 - DNA, 23 bp, Artificial Sequence
  HLA-A targeting gRNA
gtggggaaaggcctgggtaatgg

SEQ ID NO: 7416 - DNA, 23 bp, Artificial Sequence
  HLA-A targeting gRNA
gtggggcacacttctacctgggg

SEQ ID NO: 7417 - DNA, 23 bp, Artificial Sequence
  HLA-A targeting gRNA
gtgggggatggggaggggtcggg

SEQ ID NO: 7418 - DNA, 23 bp, Artificial Sequence
  HLA-A targeting gRNA
gtggggtggcgggtctggggggg

SEQ ID NO: 7419 - DNA, 23 bp, Artificial Sequence
  HLA-A targeting gRNA
gtggggtggggagggggcagagg

SEQ ID NO: 7420 - DNA, 23 bp, Artificial Sequence
  HLA-A targeting gRNA
gtgggtcacatgtgtctttgggg

SEQ ID NO: 7421 - DNA, 23 bp, Artificial Sequence
  HLA-A targeting gRNA
gtgggtcacgtgtgtctttgcgg

SEQ ID NO: 7422 - DNA, 23 bp, Artificial Sequence
  HLA-A targeting gRNA
gtgggtcacgtgtgtctttgggg

SEQ ID NO: 7423 - DNA, 23 bp, Artificial Sequence
  HLA-A targeting gRNA
gtgggtggagaaggaggggccgg

SEQ ID NO: 7424 - DNA, 23 bp, Artificial Sequence
  HLA-A targeting gRNA
gtgggtggagcaggaggggccgg

SEQ ID NO: 7425 - DNA, 23 bp, Artificial Sequence
  HLA-A targeting gRNA
gtgggtggggcagaggggaaagg

SEQ ID NO: 7426 - DNA, 23 bp, Artificial Sequence
  HLA-A targeting gRNA
gtgggtggggcagtggggaaagg

SEQ ID NO: 7427 - DNA, 23 bp, Artificial Sequence
  HLA-A targeting gRNA
gtgggtgggggtggcgggtctgg

SEQ ID NO: 7428 - DNA, 23 bp, Artificial Sequence
  HLA-A targeting gRNA
gtgggtggggtggcaggtctggg

SEQ ID NO: 7429 - DNA, 23 bp, Artificial Sequence
  HLA-A targeting gRNA
gtgggtggggtggcgggtctggg

SEQ ID NO: 7430 - DNA, 23 bp, Artificial Sequence
  HLA-A targeting gRNA
gtggtcgggggtggggcagaggg

SEQ ID NO: 7431 - DNA, 23 bp, Artificial Sequence
  HLA-A targeting gRNA
gtggtctggggtggggcagaggg

SEQ ID NO: 7432 - DNA, 23 bp, Artificial Sequence
  HLA-A targeting gRNA
gtgtagatacctcatggagtggg

SEQ ID NO: 7433 - DNA, 23 bp, Artificial Sequence
  HLA-A targeting gRNA
gtgtccgcggcggtccaggaggg

SEQ ID NO: 7434 - DNA, 23 bp, Artificial Sequence
  HLA-A targeting gRNA
gtgtctctcacagcttgaaaagg

SEQ ID NO: 7435 - DNA, 23 bp, Artificial Sequence
  HLA-A targeting gRNA
gtgtctctcatcacttgtaaagg

SEQ ID NO: 7436 - DNA, 23 bp, Artificial Sequence
  HLA-A targeting gRNA
gtgtctttgcggggtctgatggg

SEQ ID NO: 7437 - DNA, 23 bp, Artificial Sequence
  HLA-A targeting gRNA
gtgtctttgggcgttctgacggg

SEQ ID NO: 7438 - DNA, 23 bp, Artificial Sequence
  HLA-A targeting gRNA
gtgtctttggggggtctgatggg

SEQ ID NO: 7439 - DNA, 23 bp, Artificial Sequence
  HLA-A targeting gRNA
gtgtctttgggggttctgacggg

SEQ ID NO: 7440 - DNA, 23 bp, Artificial Sequence
  HLA-A targeting gRNA
gtgtctttgggtgttctgacggg

SEQ ID NO: 7441 - DNA, 23 bp, Artificial Sequence
  HLA-A targeting gRNA
gtgtctttgggtgttctgatggg

SEQ ID NO: 7442 - DNA, 23 bp, Artificial Sequence
  HLA-A targeting gRNA
gtgtgtaggaggaagagctcagg

SEQ ID NO: 7443 - DNA, 23 bp, Artificial Sequence
  HLA-A targeting gRNA
gtgttcccgtcccaatattccgg

SEQ ID NO: 7444 - DNA, 23 bp, Artificial Sequence
  HLA-A targeting gRNA
gtgttccctgcatcattactggg

SEQ ID NO: 7445 - DNA, 23 bp, Artificial Sequence
  HLA-A targeting gRNA
gtgttccctgcctcattactggg

SEQ ID NO: 7446 - DNA, 23 bp, Artificial Sequence
  HLA-A targeting gRNA
gtgttccggtcccaatattccgg

SEQ ID NO: 7447 - DNA, 23 bp, Artificial Sequence
  HLA-A targeting gRNA
gtgttccggtcccaatgctccgg

SEQ ID NO: 7448 - DNA, 23 bp, Artificial Sequence
  HLA-A targeting gRNA
gtgttcgggtcccaatactccgg

SEQ ID NO: 7449 - DNA, 23 bp, Artificial Sequence
  HLA-A targeting gRNA
gtgtttcctgatcctgccctggg

SEQ ID NO: 7450 - DNA, 23 bp, Artificial Sequence
  HLA-A targeting gRNA
gtgtttcctgatcctgccttggg

SEQ ID NO: 7451 - DNA, 23 bp, Artificial Sequence
  HLA-A targeting gRNA
gttagcataatatgaggagttgg

SEQ ID NO: 7452 - DNA, 23 bp, Artificial Sequence
  HLA-A targeting gRNA
gttagcataatgtgaggaggtgg

SEQ ID NO: 7453 - DNA, 23 bp, Artificial Sequence
  HLA-A targeting gRNA
gttagcctaatgtgaggaggtgg

SEQ ID NO: 7454 - DNA, 23 bp, Artificial Sequence
  HLA-A targeting gRNA
gttcaggtagggaaggggtgagg

SEQ ID NO: 7455 - DNA, 23 bp, Artificial Sequence
  HLA-A targeting gRNA
gttcctgttagcataatatgagg

SEQ ID NO: 7456 - DNA, 23 bp, Artificial Sequence
  HLA-A targeting gRNA
gttcctgttagcataatgtgagg

SEQ ID NO: 7457 - DNA, 23 bp, Artificial Sequence
  HLA-A targeting gRNA
gttctagaagtcccaggtcccgg

SEQ ID NO: 7458 - DNA, 23 bp, Artificial Sequence
  HLA-A targeting gRNA
gttctctcggtaagtctgcgcgg

SEQ ID NO: 7459 - DNA, 23 bp, Artificial Sequence
  HLA-A targeting gRNA
gttctggcacacagggtcccagg

SEQ ID NO: 7460 - DNA, 23 bp, Artificial Sequence
  HLA-A targeting gRNA
gttctggtagggaaggggtgagg

SEQ ID NO: 7461 - DNA, 23 bp, Artificial Sequence
  HLA-A targeting gRNA
gttgaggccaaaatccccgcggg

SEQ ID NO: 7462 - DNA, 23 bp, Artificial Sequence
  HLA-A targeting gRNA
gttgaggtcaaaatccccgcggg

SEQ ID NO: 7463 - DNA, 23 bp, Artificial Sequence
  HLA-A targeting gRNA
gttggacaggaggaattatgggg

SEQ ID NO: 7464 - DNA, 23 bp, Artificial Sequence
  HLA-A targeting gRNA
gttggaggcggcccgtgaggcgg

SEQ ID NO: 7465 - DNA, 23 bp, Artificial Sequence
  HLA-A targeting gRNA
gttggaggcggcccgtgcggcgg

SEQ ID NO: 7466 - DNA, 23 bp, Artificial Sequence
  HLA-A targeting gRNA
gttggaggcggcccgtggggcgg

SEQ ID NO: 7467 - DNA, 23 bp, Artificial Sequence
  HLA-A targeting gRNA
gttggaggcggcccgtgtggcgg

SEQ ID NO: 7468 - DNA, 23 bp, Artificial Sequence
  HLA-A targeting gRNA
gttgggagaagtgaaactcaggg

SEQ ID NO: 7469 - DNA, 23 bp, Artificial Sequence
  HLA-A targeting gRNA
gttgggagggaaacggcctctgg

SEQ ID NO: 7470 - DNA, 23 bp, Artificial Sequence
  HLA-A targeting gRNA
gttgtaatccttgccgtcgtagg

SEQ ID NO: 7471 - DNA, 23 bp, Artificial Sequence
  HLA-A targeting gRNA
gtttaggccaaaatccccgcggg

SEQ ID NO: 7472 - DNA, 23 bp, Artificial Sequence
  HLA-A targeting gRNA
gtttctccacatccgtgtcctgg

SEQ ID NO: 7473 - DNA, 23 bp, Artificial Sequence
  HLA-A targeting gRNA
gtttggctgcgacctggggccgg

SEQ ID NO: 7474 - DNA, 23 bp, Artificial Sequence
  HLA-A targeting gRNA
gtttggctgcgacgtggggccgg

SEQ ID NO: 7475 - DNA, 23 bp, Artificial Sequence
  HLA-A targeting gRNA
gttttcccgagtttcctctgagg

SEQ ID NO: 7476 - DNA, 23 bp, Artificial Sequence
  HLA-A targeting gRNA
gttttcctgagtttcctctgagg

SEQ ID NO: 7477 - DNA, 23 bp, Artificial Sequence
  HLA-A targeting gRNA
gttttcctgagtttcttctgagg

SEQ ID NO: 7478 - DNA, 23 bp, Artificial Sequence
  HLA-A targeting gRNA
taacccactgagatgaagcgggg

SEQ ID NO: 7479 - DNA, 23 bp, Artificial Sequence
  HLA-A targeting gRNA
taagtgggaggcggcccgtgagg

SEQ ID NO: 7480 - DNA, 23 bp, Artificial Sequence
  HLA-A targeting gRNA
taatgaagcggggctccccgcgg

SEQ ID NO: 7481 - DNA, 23 bp, Artificial Sequence
  HLA-A targeting gRNA
taattgtcctagacagcagaggg

SEQ ID NO: 7482 - DNA, 23 bp, Artificial Sequence
  HLA-A targeting gRNA
taattgtcctagagagaagaggg

SEQ ID NO: 7483 - DNA, 23 bp, Artificial Sequence
  HLA-A targeting gRNA
taattgtcctagagagcagacgg

SEQ ID NO: 7484 - DNA, 23 bp, Artificial Sequence
  HLA-A targeting gRNA
taattgtcctagagagcagaggg

SEQ ID NO: 7485 - DNA, 23 bp, Artificial Sequence
  HLA-A targeting gRNA
taattgtctagagagaagagggg

SEQ ID NO: 7486 - DNA, 23 bp, Artificial Sequence
  HLA-A targeting gRNA
tacaccgccatgacccggcccgg

SEQ ID NO: 7487 - DNA, 23 bp, Artificial Sequence
  HLA-A targeting gRNA
tacaccgccatgtcccggcccgg

SEQ ID NO: 7488 - DNA, 23 bp, Artificial Sequence
  HLA-A targeting gRNA
tacaccgccatgtcccggcctgg

SEQ ID NO: 7489 - DNA, 23 bp, Artificial Sequence
  HLA-A targeting gRNA
tacaccgccgtgtcccggccagg

SEQ ID NO: 7490 - DNA, 23 bp, Artificial Sequence
  HLA-A targeting gRNA
tacaccgccgtgtcccggcccgg

SEQ ID NO: 7491 - DNA, 23 bp, Artificial Sequence
  HLA-A targeting gRNA
tacaccgccgtgtcccggcctgg

SEQ ID NO: 7492 - DNA, 23 bp, Artificial Sequence
  HLA-A targeting gRNA
tacaccgccgtgtccgggcccgg

SEQ ID NO: 7493 - DNA, 23 bp, Artificial Sequence
  HLA-A targeting gRNA
tacaccgctatgtcccggcccgg

SEQ ID NO: 7494 - DNA, 23 bp, Artificial Sequence
  HLA-A targeting gRNA
tacaccgctgtgtcccggcccgg

SEQ ID NO: 7495 - DNA, 23 bp, Artificial Sequence
  HLA-A targeting gRNA
tacagacccaaggcaggatcagg

SEQ ID NO: 7496 - DNA, 23 bp, Artificial Sequence
  HLA-A targeting gRNA
tacagacccagggcaggatcagg

SEQ ID NO: 7497 - DNA, 23 bp, Artificial Sequence
  HLA-A targeting gRNA
taccaccaggacgcctacgacgg

SEQ ID NO: 7498 - DNA, 23 bp, Artificial Sequence
  HLA-A targeting gRNA
tacccaatgggagtgggaagtgg

SEQ ID NO: 7499 - DNA, 23 bp, Artificial Sequence
  HLA-A targeting gRNA
tacccagcgcaagttggaggcgg

SEQ ID NO: 7500 - DNA, 23 bp, Artificial Sequence
  HLA-A targeting gRNA
tacctcaaggagtgggagcctgg

SEQ ID NO: 7501 - DNA, 23 bp, Artificial Sequence
  HLA-A targeting gRNA
tacctcatgaagtgggagcctgg

SEQ ID NO: 7502 - DNA, 23 bp, Artificial Sequence
  HLA-A targeting gRNA
tacctcatggagagggagcctgg

SEQ ID NO: 7503 - DNA, 23 bp, Artificial Sequence
  HLA-A targeting gRNA
tacctcatggagtggaagcctgg

SEQ ID NO: 7504 - DNA, 23 bp, Artificial Sequence
  HLA-A targeting gRNA
tacctcatggagtgggaacctgg

SEQ ID NO: 7505 - DNA, 23 bp, Artificial Sequence
  HLA-A targeting gRNA
tacctcatggagtgggagactgg

SEQ ID NO: 7506 - DNA, 23 bp, Artificial Sequence
  HLA-A targeting gRNA
tacctggagggcctgtgcgtggg

SEQ ID NO: 7507 - DNA, 23 bp, Artificial Sequence
  HLA-A targeting gRNA
tacgactgcagacccagggcagg

SEQ ID NO: 7508 - DNA, 23 bp, Artificial Sequence
  HLA-A targeting gRNA
tacgtcatggagtgggagcctgg

SEQ ID NO: 7509 - DNA, 23 bp, Artificial Sequence
  HLA-A targeting gRNA
tactacaaccagagcgagaccgg

SEQ ID NO: 7510 - DNA, 23 bp, Artificial Sequence
  HLA-A targeting gRNA
tactacaaccggagcgaggacgg

SEQ ID NO: 7511 - DNA, 23 bp, Artificial Sequence
  HLA-A targeting gRNA
tactacaaccggagcgaggccgg

SEQ ID NO: 7512 - DNA, 23 bp, Artificial Sequence
  HLA-A targeting gRNA
tactataaccagagcgaggacgg

SEQ ID NO: 7513 - DNA, 23 bp, Artificial Sequence
  HLA-A targeting gRNA
tacttcatggagtgggagcctgg

SEQ ID NO: 7514 - DNA, 23 bp, Artificial Sequence
  HLA-A targeting gRNA
tacttcatggagtgggaggctgg

SEQ ID NO: 7515 - DNA, 23 bp, Artificial Sequence
  HLA-A targeting gRNA
tacttctggaaattccttttggg

SEQ ID NO: 7516 - DNA, 23 bp, Artificial Sequence
  HLA-A targeting gRNA
tacttctggaaattctttttggg

SEQ ID NO: 7517 - DNA, 23 bp, Artificial Sequence
  HLA-A targeting gRNA
tagaagtcccaggtcccgggcgg

SEQ ID NO: 7518 - DNA, 23 bp, Artificial Sequence
  HLA-A targeting gRNA
tagacgacacgcagttcgtgcgg

SEQ ID NO: 7519 - DNA, 23 bp, Artificial Sequence
  HLA-A targeting gRNA
tagagtgggcaggggggtggtgg

SEQ ID NO: 7520 - DNA, 23 bp, Artificial Sequence
  HLA-A targeting gRNA
tagagtgggcggggggggcgggg

SEQ ID NO: 7521 - DNA, 23 bp, Artificial Sequence
  HLA-A targeting gRNA
tagagtgggcggggggggggtgg

SEQ ID NO: 7522 - DNA, 23 bp, Artificial Sequence
  HLA-A targeting gRNA
tagagtgggcgggggggggtggg

SEQ ID NO: 7523 - DNA, 23 bp, Artificial Sequence
  HLA-A targeting gRNA
tagagtgggcggggggggtgggg

SEQ ID NO: 7524 - DNA, 23 bp, Artificial Sequence
  HLA-A targeting gRNA
tagcacacagggtcccaggctgg

SEQ ID NO: 7525 - DNA, 23 bp, Artificial Sequence
  HLA-A targeting gRNA
tagcccacggtaatgaagcgggg

SEQ ID NO: 7526 - DNA, 23 bp, Artificial Sequence
  HLA-A targeting gRNA
tagcccacggtgatgaagcgggg

SEQ ID NO: 7527 - DNA, 23 bp, Artificial Sequence
  HLA-A targeting gRNA
tagcccactgagacgaagcgggg

SEQ ID NO: 7528 - DNA, 23 bp, Artificial Sequence
  HLA-A targeting gRNA
tagcccactgagatgaagcgggg

SEQ ID NO: 7529 - DNA, 23 bp, Artificial Sequence
  HLA-A targeting gRNA
tagcccactgcaatgaagcgggg

SEQ ID NO: 7530 - DNA, 23 bp, Artificial Sequence
  HLA-A targeting gRNA
tagcccactgcgatgaagtgggg

SEQ ID NO: 7531 - DNA, 23 bp, Artificial Sequence
  HLA-A targeting gRNA
tagcgcactgagatgaagcgggg

SEQ ID NO: 7532 - DNA, 23 bp, Artificial Sequence
  HLA-A targeting gRNA
tagcggtgaccacagctccaagg

SEQ ID NO: 7533 - DNA, 23 bp, Artificial Sequence
  HLA-A targeting gRNA
taggaggaagagctcaggtaggg

SEQ ID NO: 7534 - DNA, 23 bp, Artificial Sequence
  HLA-A targeting gRNA
taggaggaagagttcaggtaggg

SEQ ID NO: 7535 - DNA, 23 bp, Artificial Sequence
  HLA-A targeting gRNA
taggaggaagagttctggtaggg

SEQ ID NO: 7536 - DNA, 23 bp, Artificial Sequence
  HLA-A targeting gRNA
taggagggaaacggcctctgcgg

SEQ ID NO: 7537 - DNA, 23 bp, Artificial Sequence
  HLA-A targeting gRNA
taggcgacccgggccgtccgtgg

SEQ ID NO: 7538 - DNA, 23 bp, Artificial Sequence
  HLA-A targeting gRNA
taggctgggaagatggctctggg

SEQ ID NO: 7539 - DNA, 23 bp, Artificial Sequence
  HLA-A targeting gRNA
tagggaaggggtgaagagcgggg

SEQ ID NO: 7540 - DNA, 23 bp, Artificial Sequence
  HLA-A targeting gRNA
tagggaaggggtgaggagtgggg

SEQ ID NO: 7541 - DNA, 23 bp, Artificial Sequence
  HLA-A targeting gRNA
tagggaaggggtgaggggtgggg

SEQ ID NO: 7542 - DNA, 23 bp, Artificial Sequence
  HLA-A targeting gRNA
tagggaaggggtggggagtgggg

SEQ ID NO: 7543 - DNA, 23 bp, Artificial Sequence
  HLA-A targeting gRNA
taggtccgagatccgccccgagg

SEQ ID NO: 7544 - DNA, 23 bp, Artificial Sequence
  HLA-A targeting gRNA
tagttctggaaacttctcttggg

SEQ ID NO: 7545 - DNA, 23 bp, Artificial Sequence
  HLA-A targeting gRNA
tataaccagtacgcctacgacgg

SEQ ID NO: 7546 - DNA, 23 bp, Artificial Sequence
  HLA-A targeting gRNA
tataaccagttagcctacgacgg

SEQ ID NO: 7547 - DNA, 23 bp, Artificial Sequence
  HLA-A targeting gRNA
tataaccagttcgcctacgacgg

SEQ ID NO: 7548 - DNA, 23 bp, Artificial Sequence
  HLA-A targeting gRNA
tataaccagttcgcctacgatgg

SEQ ID NO: 7549 - DNA, 23 bp, Artificial Sequence
  HLA-A targeting gRNA
tatccaatacccaatgggagtgg

SEQ ID NO: 7550 - DNA, 23 bp, Artificial Sequence
  HLA-A targeting gRNA
tatcccaggtccctgtgtccagg

SEQ ID NO: 7551 - DNA, 23 bp, Artificial Sequence
  HLA-A targeting gRNA
tatcccaggtgcctgcgtccagg

SEQ ID NO: 7552 - DNA, 23 bp, Artificial Sequence
  HLA-A targeting gRNA
tatcccaggtgcctgcgtccggg

SEQ ID NO: 7553 - DNA, 23 bp, Artificial Sequence
  HLA-A targeting gRNA
tatccgacacccaatgggagtgg

SEQ ID NO: 7554 - DNA, 23 bp, Artificial Sequence
  HLA-A targeting gRNA
tatctctgctcttctccagaagg

SEQ ID NO: 7555 - DNA, 23 bp, Artificial Sequence
  HLA-A targeting gRNA
tatctctgctcttgtccagaagg

SEQ ID NO: 7556 - DNA, 23 bp, Artificial Sequence
  HLA-A targeting gRNA
tatctctgctgttctccagaagg

SEQ ID NO: 7557 - DNA, 23 bp, Artificial Sequence
  HLA-A targeting gRNA
tatctctgttcttgtccagaagg

SEQ ID NO: 7558 - DNA, 23 bp, Artificial Sequence
  HLA-A targeting gRNA
tatctcttctcagggaaagcagg

SEQ ID NO: 7559 - DNA, 23 bp, Artificial Sequence
  HLA-A targeting gRNA
tatctgcggagccactccacagg

SEQ ID NO: 7560 - DNA, 23 bp, Artificial Sequence
  HLA-A targeting gRNA
tatctgttctcagggaaagcagg

SEQ ID NO: 7561 - DNA, 23 bp, Artificial Sequence
  HLA-A targeting gRNA
tatgaccaggacgcctacgacgg

SEQ ID NO: 7562 - DNA, 23 bp, Artificial Sequence
  HLA-A targeting gRNA
tatgaccagtacgcctacgacgg

SEQ ID NO: 7563 - DNA, 23 bp, Artificial Sequence
  HLA-A targeting gRNA
tatgaccagtccgcctaagacgg

SEQ ID NO: 7564 - DNA, 23 bp, Artificial Sequence
  HLA-A targeting gRNA
tatgaccagtccgcctacgacgg

SEQ ID NO: 7565 - DNA, 23 bp, Artificial Sequence
  HLA-A targeting gRNA
tatgaccagttcgcctacgacgg

SEQ ID NO: 7566 - DNA, 23 bp, Artificial Sequence
  HLA-A targeting gRNA
tatgaccggtccgcctacgacgg

SEQ ID NO: 7567 - DNA, 23 bp, Artificial Sequence
  HLA-A targeting gRNA
tatgactacagacccaaggcagg

SEQ ID NO: 7568 - DNA, 23 bp, Artificial Sequence
  HLA-A targeting gRNA
tatgactacagacccagggcagg

SEQ ID NO: 7569 - DNA, 23 bp, Artificial Sequence
  HLA-A targeting gRNA
tatgactgcagacccagggcagg

SEQ ID NO: 7570 - DNA, 23 bp, Artificial Sequence
  HLA-A targeting gRNA
tatgagcagtatgcctacgacgg

SEQ ID NO: 7571 - DNA, 23 bp, Artificial Sequence
  HLA-A targeting gRNA
tatgatcagtccgcctacgacgg

SEQ ID NO: 7572 - DNA, 23 bp, Artificial Sequence
  HLA-A targeting gRNA
tatggccagtccgcctacgacgg

SEQ ID NO: 7573 - DNA, 23 bp, Artificial Sequence
  HLA-A targeting gRNA
tatggctgcgacgtggggcccgg

SEQ ID NO: 7574 - DNA, 23 bp, Artificial Sequence
  HLA-A targeting gRNA
tatgtaatccttgccgtcgtagg

SEQ ID NO: 7575 - DNA, 23 bp, Artificial Sequence
  HLA-A targeting gRNA
tatgtccagtacgcctacgacgg

SEQ ID NO: 7576 - DNA, 23 bp, Artificial Sequence
  HLA-A targeting gRNA
tatgtcccggcccggccgcgggg

SEQ ID NO: 7577 - DNA, 23 bp, Artificial Sequence
  HLA-A targeting gRNA
tatttctacaccgccgtgtccgg

SEQ ID NO: 7578 - DNA, 23 bp, Artificial Sequence
  HLA-A targeting gRNA
tcaaagaatccccattacccagg

SEQ ID NO: 7579 - DNA, 23 bp, Artificial Sequence
  HLA-A targeting gRNA
tcaaagaatctccattacccagg

SEQ ID NO: 7580 - DNA, 23 bp, Artificial Sequence
  HLA-A targeting gRNA
tcaaagaatgtccattacccagg

SEQ ID NO: 7581 - DNA, 23 bp, Artificial Sequence
  HLA-A targeting gRNA
tcaaaggatccccattacccagg

SEQ ID NO: 7582 - DNA, 23 bp, Artificial Sequence
  HLA-A targeting gRNA
tcaaaggatccccattacctagg

SEQ ID NO: 7583 - DNA, 23 bp, Artificial Sequence
  HLA-A targeting gRNA
tcaagagcccgcaggagacgtgg

SEQ ID NO: 7584 - DNA, 23 bp, Artificial Sequence
  HLA-A targeting gRNA
tcacagctcctaggacagctagg

SEQ ID NO: 7585 - DNA, 23 bp, Artificial Sequence
  HLA-A targeting gRNA
tcacaggggctaacgcagcctgg

SEQ ID NO: 7586 - DNA, 23 bp, Artificial Sequence
  HLA-A targeting gRNA
tcaccgctaagatgtgtaggagg

SEQ ID NO: 7587 - DNA, 23 bp, Artificial Sequence
  HLA-A targeting gRNA
tcaccgctatgatgtgtaggagg

SEQ ID NO: 7588 - DNA, 23 bp, Artificial Sequence
  HLA-A targeting gRNA
tcaccttcccctcctttcccagg

SEQ ID NO: 7589 - DNA, 23 bp, Artificial Sequence
  HLA-A targeting gRNA
tcaccttgatattatggtgttgg

SEQ ID NO: 7590 - DNA, 23 bp, Artificial Sequence
  HLA-A targeting gRNA
tcacgactccccatcccccacgg

SEQ ID NO: 7591 - DNA, 23 bp, Artificial Sequence
  HLA-A targeting gRNA
tcactcggtcagcctgtgcctgg

SEQ ID NO: 7592 - DNA, 23 bp, Artificial Sequence
  HLA-A targeting gRNA
tcactcggtcagtctgtgcctgg

SEQ ID NO: 7593 - DNA, 23 bp, Artificial Sequence
  HLA-A targeting gRNA
tcacttctcccaacctgcgtcgg

SEQ ID NO: 7594 - DNA, 23 bp, Artificial Sequence
  HLA-A targeting gRNA
tcacttcttctcccaacttgtgg

SEQ ID NO: 7595 - DNA, 23 bp, Artificial Sequence
  HLA-A targeting gRNA
tcagagcccacaggagacgtggg

SEQ ID NO: 7596 - DNA, 23 bp, Artificial Sequence
  HLA-A targeting gRNA
tcagagcccacaggagatgtggg

SEQ ID NO: 7597 - DNA, 23 bp, Artificial Sequence
  HLA-A targeting gRNA
tcagagcccgcaggagacgtggg

SEQ ID NO: 7598 - DNA, 23 bp, Artificial Sequence
  HLA-A targeting gRNA
tcagagcccgcaggagacgttgg

SEQ ID NO: 7599 - DNA, 23 bp, Artificial Sequence
  HLA-A targeting gRNA
tcagagcccgcaggagatgtggg

SEQ ID NO: 7600 - DNA, 23 bp, Artificial Sequence
  HLA-A targeting gRNA
tcagagccctcaggagacgtggg

SEQ ID NO: 7601 - DNA, 23 bp, Artificial Sequence
  HLA-A targeting gRNA
tcagatcacccagcacaagttgg

SEQ ID NO: 7602 - DNA, 23 bp, Artificial Sequence
  HLA-A targeting gRNA
tcagatcacccagcccaagtggg

SEQ ID NO: 7603 - DNA, 23 bp, Artificial Sequence
  HLA-A targeting gRNA
tcagatcacccagcccaagttgg

SEQ ID NO: 7604 - DNA, 23 bp, Artificial Sequence
  HLA-A targeting gRNA
tcagatcacccagcgcaaatggg

SEQ ID NO: 7605 - DNA, 23 bp, Artificial Sequence
  HLA-A targeting gRNA
tcagatcacccagcgcaagttgg

SEQ ID NO: 7606 - DNA, 23 bp, Artificial Sequence
  HLA-A targeting gRNA
tcagatcacccagcgtaagtggg

SEQ ID NO: 7607 - DNA, 23 bp, Artificial Sequence
  HLA-A targeting gRNA
tcagatcacccagctcaagtggg

SEQ ID NO: 7608 - DNA, 23 bp, Artificial Sequence
  HLA-A targeting gRNA
tcagatcactcagcgcaagttgg

SEQ ID NO: 7609 - DNA, 23 bp, Artificial Sequence
  HLA-A targeting gRNA
tcagatcatccagcgcaagtggg

SEQ ID NO: 7610 - DNA, 23 bp, Artificial Sequence
  HLA-A targeting gRNA
tcagatctcccagcgcaagtggg

SEQ ID NO: 7611 - DNA, 23 bp, Artificial Sequence
  HLA-A targeting gRNA
tcagatctcccagcgcaagttgg

SEQ ID NO: 7612 - DNA, 23 bp, Artificial Sequence
  HLA-A targeting gRNA
tcagattacccagcgcaagttgg

SEQ ID NO: 7613 - DNA, 23 bp, Artificial Sequence
  HLA-A targeting gRNA
tcagccctgacccagctgaaggg

SEQ ID NO: 7614 - DNA, 23 bp, Artificial Sequence
  HLA-A targeting gRNA
tcagccctgacccggctgaaggg

SEQ ID NO: 7615 - DNA, 23 bp, Artificial Sequence
  HLA-A targeting gRNA
tcagccctgacctggctgaaggg

SEQ ID NO: 7616 - DNA, 23 bp, Artificial Sequence
  HLA-A targeting gRNA
tcaggctgcgtgtaagtgatggg

SEQ ID NO: 7617 - DNA, 23 bp, Artificial Sequence
  HLA-A targeting gRNA
tcaggctgcgtgtaagtggtggg

SEQ ID NO: 7618 - DNA, 23 bp, Artificial Sequence
  HLA-A targeting gRNA
tcagggccatgcgatcttagggg

SEQ ID NO: 7619 - DNA, 23 bp, Artificial Sequence
  HLA-A targeting gRNA
tcagggcggggcggggctcgggg

SEQ ID NO: 7620 - DNA, 23 bp, Artificial Sequence
  HLA-A targeting gRNA
tcaggggaaggtccctgctaagg

SEQ ID NO: 7621 - DNA, 23 bp, Artificial Sequence
  HLA-A targeting gRNA
tcaggtagggaaggggtgagggg

SEQ ID NO: 7622 - DNA, 23 bp, Artificial Sequence
  HLA-A targeting gRNA
tcagtccgcctacgacggcaagg

SEQ ID NO: 7623 - DNA, 23 bp, Artificial Sequence
  HLA-A targeting gRNA
tcatcccattctccattcaaggg

SEQ ID NO: 7624 - DNA, 23 bp, Artificial Sequence
  HLA-A targeting gRNA
tcatcccattttccattcaaggg

SEQ ID NO: 7625 - DNA, 23 bp, Artificial Sequence
  HLA-A targeting gRNA
tcatcccccacggacggcccggg

SEQ ID NO: 7626 - DNA, 23 bp, Artificial Sequence
  HLA-A targeting gRNA
tcatgactattgtgttctgtagg

SEQ ID NO: 7627 - DNA, 23 bp, Artificial Sequence
  HLA-A targeting gRNA
tcatgccattctccattcaacgg

SEQ ID NO: 7628 - DNA, 23 bp, Artificial Sequence
  HLA-A targeting gRNA
tcatgccattctccattcaaggg

SEQ ID NO: 7629 - DNA, 23 bp, Artificial Sequence
  HLA-A targeting gRNA
tcattcggtcagtctgtgcctgg

SEQ ID NO: 7630 - DNA, 23 bp, Artificial Sequence
  HLA-A targeting gRNA
tcattttcctcccctcctcgtgg

SEQ ID NO: 7631 - DNA, 23 bp, Artificial Sequence
  HLA-A targeting gRNA
tccaacttttctgagtccttcgg

SEQ ID NO: 7632 - DNA, 23 bp, Artificial Sequence
  HLA-A targeting gRNA
tccaagcctcagccctgacccgg

SEQ ID NO: 7633 - DNA, 23 bp, Artificial Sequence
  HLA-A targeting gRNA
tccaagggccgtgtctgcactgg

SEQ ID NO: 7634 - DNA, 23 bp, Artificial Sequence
  HLA-A targeting gRNA
tccaagggccgtgtctgcattgg

SEQ ID NO: 7635 - DNA, 23 bp, Artificial Sequence
  HLA-A targeting gRNA
tccaatgaatagattatcccagg

SEQ ID NO: 7636 - DNA, 23 bp, Artificial Sequence
  HLA-A targeting gRNA
tccacatccgtgtcctggcccgg

SEQ ID NO: 7637 - DNA, 23 bp, Artificial Sequence
  HLA-A targeting gRNA
tccaccccaaggtggatctgcgg

SEQ ID NO: 7638 - DNA, 23 bp, Artificial Sequence
  HLA-A targeting gRNA
tccagccagcgacagtgcccagg

SEQ ID NO: 7639 - DNA, 23 bp, Artificial Sequence
  HLA-A targeting gRNA
tccagcttttctgagtccttcgg

SEQ ID NO: 7640 - DNA, 23 bp, Artificial Sequence
  HLA-A targeting gRNA
tccaggcagcgacagtgcccagg

SEQ ID NO: 7641 - DNA, 23 bp, Artificial Sequence
  HLA-A targeting gRNA
tccaggtctcgatcagggccagg

SEQ ID NO: 7642 - DNA, 23 bp, Artificial Sequence
  HLA-A targeting gRNA
tcccactcccattgggtgtcggg

SEQ ID NO: 7643 - DNA, 23 bp, Artificial Sequence
  HLA-A targeting gRNA
tcccaggctcccactccatgagg

SEQ ID NO: 7644 - DNA, 23 bp, Artificial Sequence
  HLA-A targeting gRNA
tcccagggccgtgtctgcattgg

SEQ ID NO: 7645 - DNA, 23 bp, Artificial Sequence
  HLA-A targeting gRNA
tcccaggtgcctgcatccgctgg

SEQ ID NO: 7646 - DNA, 23 bp, Artificial Sequence
  HLA-A targeting gRNA
tcccaggtgcctgcgtccgctgg

SEQ ID NO: 7647 - DNA, 23 bp, Artificial Sequence
  HLA-A targeting gRNA
tcccattctccaggtatctgcgg

SEQ ID NO: 7648 - DNA, 23 bp, Artificial Sequence
  HLA-A targeting gRNA
tcccattctccattcaagggagg

SEQ ID NO: 7649 - DNA, 23 bp, Artificial Sequence
  HLA-A targeting gRNA
tcccattcttcaggtatctgcgg

SEQ ID NO: 7650 - DNA, 23 bp, Artificial Sequence
  HLA-A targeting gRNA
tcccattcttcaggtgtctgcgg

SEQ ID NO: 7651 - DNA, 23 bp, Artificial Sequence
  HLA-A targeting gRNA
tcccattttccattcaagggagg

SEQ ID NO: 7652 - DNA, 23 bp, Artificial Sequence
  HLA-A targeting gRNA
tccccaattcccactcccattgg

SEQ ID NO: 7653 - DNA, 23 bp, Artificial Sequence
  HLA-A targeting gRNA
tccccacttcccactcccattgg

SEQ ID NO: 7654 - DNA, 23 bp, Artificial Sequence
  HLA-A targeting gRNA
tccccatttcccactcccattgg

SEQ ID NO: 7655 - DNA, 23 bp, Artificial Sequence
  HLA-A targeting gRNA
tccccgcgggttgggcggggcgg

SEQ ID NO: 7656 - DNA, 23 bp, Artificial Sequence
  HLA-A targeting gRNA
tccccgcgggttggtcagggcgg

SEQ ID NO: 7657 - DNA, 23 bp, Artificial Sequence
  HLA-A targeting gRNA
tccccgcgggttggtcggggcgg

SEQ ID NO: 7658 - DNA, 23 bp, Artificial Sequence
  HLA-A targeting gRNA
tcccctccttaccccagctcagg

SEQ ID NO: 7659 - DNA, 23 bp, Artificial Sequence
  HLA-A targeting gRNA
tcccgagagcagcaggaggacgg

SEQ ID NO: 7660 - DNA, 23 bp, Artificial Sequence
  HLA-A targeting gRNA
tcccgagagcagcaggaggaggg

SEQ ID NO: 7661 - DNA, 23 bp, Artificial Sequence
  HLA-A targeting gRNA
tcccgagagcagcaggatgaggg

SEQ ID NO: 7662 - DNA, 23 bp, Artificial Sequence
  HLA-A targeting gRNA
tcccggcatggcctcccacgagg

SEQ ID NO: 7663 - DNA, 23 bp, Artificial Sequence
  HLA-A targeting gRNA
tcccgggatggcctcccacgagg

SEQ ID NO: 7664 - DNA, 23 bp, Artificial Sequence
  HLA-A targeting gRNA
tcccgggatggccttccacgagg

SEQ ID NO: 7665 - DNA, 23 bp, Artificial Sequence
  HLA-A targeting gRNA
tcccgttccccaggtatctgcgg

SEQ ID NO: 7666 - DNA, 23 bp, Artificial Sequence
  HLA-A targeting gRNA
tcccgttctccagatatctgcgg

SEQ ID NO: 7667 - DNA, 23 bp, Artificial Sequence
  HLA-A targeting gRNA
tcccgttctccaggtatccgcgg

SEQ ID NO: 7668 - DNA, 23 bp, Artificial Sequence
  HLA-A targeting gRNA
tccctttctccaggtatctgcgg

SEQ ID NO: 7669 - DNA, 23 bp, Artificial Sequence
  HLA-A targeting gRNA
tccctttcttcaggtatctgcgg

SEQ ID NO: 7670 - DNA, 23 bp, Artificial Sequence
  HLA-A targeting gRNA
tccgagagccttgtctgcattgg

SEQ ID NO: 7671 - DNA, 23 bp, Artificial Sequence
  HLA-A targeting gRNA
tccgagggccgcgtctgcaatgg

SEQ ID NO: 7672 - DNA, 23 bp, Artificial Sequence
  HLA-A targeting gRNA
tccgagggccgcgtctgcattgg

SEQ ID NO: 7673 - DNA, 23 bp, Artificial Sequence
  HLA-A targeting gRNA
tccgagtccgggtgggtgactgg

SEQ ID NO: 7674 - DNA, 23 bp, Artificial Sequence
  HLA-A targeting gRNA
tccgcagacacctgaagaatggg

SEQ ID NO: 7675 - DNA, 23 bp, Artificial Sequence
  HLA-A targeting gRNA
tccgcagacacctggagaacagg

SEQ ID NO: 7676 - DNA, 23 bp, Artificial Sequence
  HLA-A targeting gRNA
tccgcagatacctgaagaaaggg

SEQ ID NO: 7677 - DNA, 23 bp, Artificial Sequence
  HLA-A targeting gRNA
tccgcagatacctgaagaatggg

SEQ ID NO: 7678 - DNA, 23 bp, Artificial Sequence
  HLA-A targeting gRNA
tccgcagatacctggagaaaggg

SEQ ID NO: 7679 - DNA, 23 bp, Artificial Sequence
  HLA-A targeting gRNA
tccgcagatacctggagaacagg

SEQ ID NO: 7680 - DNA, 23 bp, Artificial Sequence
  HLA-A targeting gRNA
tccgcagatacctggagaaccgg

SEQ ID NO: 7681 - DNA, 23 bp, Artificial Sequence
  HLA-A targeting gRNA
tccgcagatacctggagaatggg

SEQ ID NO: 7682 - DNA, 23 bp, Artificial Sequence
  HLA-A targeting gRNA
tccgcagatacctggggaacggg

SEQ ID NO: 7683 - DNA, 23 bp, Artificial Sequence
  HLA-A targeting gRNA
tccgcagatatctggagaacggg

SEQ ID NO: 7684 - DNA, 23 bp, Artificial Sequence
  HLA-A targeting gRNA
tccgcagatccaccttggggtgg

SEQ ID NO: 7685 - DNA, 23 bp, Artificial Sequence
  HLA-A targeting gRNA
tccgccgcgtccaggagcgcagg

SEQ ID NO: 7686 - DNA, 23 bp, Artificial Sequence
  HLA-A targeting gRNA
tccgcggatacctggagaacggg

SEQ ID NO: 7687 - DNA, 23 bp, Artificial Sequence
  HLA-A targeting gRNA
tccgcggccaggccgggacacgg

SEQ ID NO: 7688 - DNA, 23 bp, Artificial Sequence
  HLA-A targeting gRNA
tccgcggccgggccaggacacgg

SEQ ID NO: 7689 - DNA, 23 bp, Artificial Sequence
  HLA-A targeting gRNA
tccgcggccgggcccggacacgg

SEQ ID NO: 7690 - DNA, 23 bp, Artificial Sequence
  HLA-A targeting gRNA
tccgcggccgggccgggacacgg

SEQ ID NO: 7691 - DNA, 23 bp, Artificial Sequence
  HLA-A targeting gRNA
tccgcggcctggccgggacacgg

SEQ ID NO: 7692 - DNA, 23 bp, Artificial Sequence
  HLA-A targeting gRNA
tccggcccctcctccacccacgg

SEQ ID NO: 7693 - DNA, 23 bp, Artificial Sequence
  HLA-A targeting gRNA
tccggttctccaggtatctgcgg

SEQ ID NO: 7694 - DNA, 23 bp, Artificial Sequence
  HLA-A targeting gRNA
tccggttgtagtagccgcgcagg

SEQ ID NO: 7695 - DNA, 23 bp, Artificial Sequence
  HLA-A targeting gRNA
tccgtgtcccggcccggcagcgg

SEQ ID NO: 7696 - DNA, 23 bp, Artificial Sequence
  HLA-A targeting gRNA
tccgtgtcccggcctggccgcgg

SEQ ID NO: 7697 - DNA, 23 bp, Artificial Sequence
  HLA-A targeting gRNA
tccgtgtcctggcccggccgcgg

SEQ ID NO: 7698 - DNA, 23 bp, Artificial Sequence
  HLA-A targeting gRNA
tcctaaggtctgtccttagcagg

SEQ ID NO: 7699 - DNA, 23 bp, Artificial Sequence
  HLA-A targeting gRNA
tcctaccggcgcggctccccggg

SEQ ID NO: 7700 - DNA, 23 bp, Artificial Sequence
  HLA-A targeting gRNA
tcctccacccacggcgcccgcgg

SEQ ID NO: 7701 - DNA, 23 bp, Artificial Sequence
  HLA-A targeting gRNA
tcctcccctttgtgacttcaagg

SEQ ID NO: 7702 - DNA, 23 bp, Artificial Sequence
  HLA-A targeting gRNA
tcctcccggcgcggctccccggg

SEQ ID NO: 7703 - DNA, 23 bp, Artificial Sequence
  HLA-A targeting gRNA
tcctcccggcgcggctcctcagg

SEQ ID NO: 7704 - DNA, 23 bp, Artificial Sequence
  HLA-A targeting gRNA
tcctccctgcgccgctccccggg

SEQ ID NO: 7705 - DNA, 23 bp, Artificial Sequence
  HLA-A targeting gRNA
tcctccctgcgcggctccccggg

SEQ ID NO: 7706 - DNA, 23 bp, Artificial Sequence
  HLA-A targeting gRNA
tcctccctgcgcggcttcccggg

SEQ ID NO: 7707 - DNA, 23 bp, Artificial Sequence
  HLA-A targeting gRNA
tcctcgtggaaggccatcccggg

SEQ ID NO: 7708 - DNA, 23 bp, Artificial Sequence
  HLA-A targeting gRNA
tcctcgtgggaggccatcccggg

SEQ ID NO: 7709 - DNA, 23 bp, Artificial Sequence
  HLA-A targeting gRNA
tcctcgtgggaggccatgccggg

SEQ ID NO: 7710 - DNA, 23 bp, Artificial Sequence
  HLA-A targeting gRNA
tcctgaagatctgtgtgttccgg

SEQ ID NO: 7711 - DNA, 23 bp, Artificial Sequence
  HLA-A targeting gRNA
tcctggccctgaccgagacctgg

SEQ ID NO: 7712 - DNA, 23 bp, Artificial Sequence
  HLA-A targeting gRNA
tcctgtccaacgtctcctgcggg

SEQ ID NO: 7713 - DNA, 23 bp, Artificial Sequence
  HLA-A targeting gRNA
tcctgtcccacgtctcctgaggg

SEQ ID NO: 7714 - DNA, 23 bp, Artificial Sequence
  HLA-A targeting gRNA
tcctgtcccacgtctcctgcggg

SEQ ID NO: 7715 - DNA, 23 bp, Artificial Sequence
  HLA-A targeting gRNA
tcctgtcccacgtctcctgtggg

SEQ ID NO: 7716 - DNA, 23 bp, Artificial Sequence
  HLA-A targeting gRNA
tcctgttctccaggtatctgcgg

SEQ ID NO: 7717 - DNA, 23 bp, Artificial Sequence
  HLA-A targeting gRNA
tcctgttctccaggtgtctgcgg

SEQ ID NO: 7718 - DNA, 23 bp, Artificial Sequence
  HLA-A targeting gRNA
tcctgttttggttctactccagg

SEQ ID NO: 7719 - DNA, 23 bp, Artificial Sequence
  HLA-A targeting gRNA
tcctgtttttgttctactccagg

SEQ ID NO: 7720 - DNA, 23 bp, Artificial Sequence
  HLA-A targeting gRNA
tccttctggagcccttcagccgg

SEQ ID NO: 7721 - DNA, 23 bp, Artificial Sequence
  HLA-A targeting gRNA
tcgacgggcgcctcctccgcggg

SEQ ID NO: 7722 - DNA, 23 bp, Artificial Sequence
  HLA-A targeting gRNA
tcgccggtcgagggtctgggcgg

SEQ ID NO: 7723 - DNA, 23 bp, Artificial Sequence
  HLA-A targeting gRNA
tcgccggtcgagggtttgggcgg

SEQ ID NO: 7724 - DNA, 23 bp, Artificial Sequence
  HLA-A targeting gRNA
tcgcctggtctccacaagctcgg

SEQ ID NO: 7725 - DNA, 23 bp, Artificial Sequence
  HLA-A targeting gRNA
tcgcgggacggggctgaccacgg

SEQ ID NO: 7726 - DNA, 23 bp, Artificial Sequence
  HLA-A targeting gRNA
tcgctactgtgatgtgtaggagg

SEQ ID NO: 7727 - DNA, 23 bp, Artificial Sequence
  HLA-A targeting gRNA
tcgctgctgtgatacataggagg

SEQ ID NO: 7728 - DNA, 23 bp, Artificial Sequence
  HLA-A targeting gRNA
tcgctgctgtgatgtgtaggagg

SEQ ID NO: 7729 - DNA, 23 bp, Artificial Sequence
  HLA-A targeting gRNA
tcgctgctgtggtgtgtaggagg

SEQ ID NO: 7730 - DNA, 23 bp, Artificial Sequence
  HLA-A targeting gRNA
tcgcttgtaaggtgagattctgg

SEQ ID NO: 7731 - DNA, 23 bp, Artificial Sequence
  HLA-A targeting gRNA
tcggacgggcgcctcctccgcgg

SEQ ID NO: 7732 - DNA, 23 bp, Artificial Sequence
  HLA-A targeting gRNA
tcgggacctgcgccccgggccgg

SEQ ID NO: 7733 - DNA, 23 bp, Artificial Sequence
  HLA-A targeting gRNA
tcgggactggggcggggctcggg

SEQ ID NO: 7734 - DNA, 23 bp, Artificial Sequence
  HLA-A targeting gRNA
tcgggcccctcctcgcccccagg

SEQ ID NO: 7735 - DNA, 23 bp, Artificial Sequence
  HLA-A targeting gRNA
tcggggctggggcggggctcggg

SEQ ID NO: 7736 - DNA, 23 bp, Artificial Sequence
  HLA-A targeting gRNA
tcggggctggggcggggttcggg

SEQ ID NO: 7737 - DNA, 23 bp, Artificial Sequence
  HLA-A targeting gRNA
tcgggggaaggtccctgctaagg

SEQ ID NO: 7738 - DNA, 23 bp, Artificial Sequence
  HLA-A targeting gRNA
tcgggggaccgggctgaccacgg

SEQ ID NO: 7739 - DNA, 23 bp, Artificial Sequence
  HLA-A targeting gRNA
tcgggggacgggctgaccacggg

SEQ ID NO: 7740 - DNA, 23 bp, Artificial Sequence
  HLA-A targeting gRNA
tcgggggacggggctgaccacgg

SEQ ID NO: 7741 - DNA, 23 bp, Artificial Sequence
  HLA-A targeting gRNA
tcgggggacggggctgaccgcgg

SEQ ID NO: 7742 - DNA, 23 bp, Artificial Sequence
  HLA-A targeting gRNA
tcgggggacggggctggccgcgg

SEQ ID NO: 7743 - DNA, 23 bp, Artificial Sequence
  HLA-A targeting gRNA
tcgggggacggtgctgaccgcgg

SEQ ID NO: 7744 - DNA, 23 bp, Artificial Sequence
  HLA-A targeting gRNA
tcgggggactgggctgaccacgg

SEQ ID NO: 7745 - DNA, 23 bp, Artificial Sequence
  HLA-A targeting gRNA
tcgggggcggatctcggacccgg

SEQ ID NO: 7746 - DNA, 23 bp, Artificial Sequence
  HLA-A targeting gRNA
tcggtaaggagggggatgagggg

SEQ ID NO: 7747 - DNA, 23 bp, Artificial Sequence
  HLA-A targeting gRNA
tcgtgacctgcgccccaggccgg

SEQ ID NO: 7748 - DNA, 23 bp, Artificial Sequence
  HLA-A targeting gRNA
tctagaacccgacacccaatggg

SEQ ID NO: 7749 - DNA, 23 bp, Artificial Sequence
  HLA-A targeting gRNA
tctagaatccgacacccaatggg

SEQ ID NO: 7750 - DNA, 23 bp, Artificial Sequence
  HLA-A targeting gRNA
tctagacacccgacacccaatgg

SEQ ID NO: 7751 - DNA, 23 bp, Artificial Sequence
  HLA-A targeting gRNA
tctagagtgggcgggggggcggg

SEQ ID NO: 7752 - DNA, 23 bp, Artificial Sequence
  HLA-A targeting gRNA
tctagagtgggcggggggggcgg

SEQ ID NO: 7753 - DNA, 23 bp, Artificial Sequence
  HLA-A targeting gRNA
tctagagtgggcggggggggtgg

SEQ ID NO: 7754 - DNA, 23 bp, Artificial Sequence
  HLA-A targeting gRNA
tctagagtgggtgggggtggcgg

SEQ ID NO: 7755 - DNA, 23 bp, Artificial Sequence
  HLA-A targeting gRNA
tctagagtgggtggggtggcagg

SEQ ID NO: 7756 - DNA, 23 bp, Artificial Sequence
  HLA-A targeting gRNA
tctagagtgggtggggtggcggg

SEQ ID NO: 7757 - DNA, 23 bp, Artificial Sequence
  HLA-A targeting gRNA
tctagatatccaatacccaatgg

SEQ ID NO: 7758 - DNA, 23 bp, Artificial Sequence
  HLA-A targeting gRNA
tctagatatccgacacccaatgg

SEQ ID NO: 7759 - DNA, 23 bp, Artificial Sequence
  HLA-A targeting gRNA
tctcaactgctccgcctcacggg

SEQ ID NO: 7760 - DNA, 23 bp, Artificial Sequence
  HLA-A targeting gRNA
tctcacatccagaggatgtacgg

SEQ ID NO: 7761 - DNA, 23 bp, Artificial Sequence
  HLA-A targeting gRNA
tctcagcccctccttgccccagg

SEQ ID NO: 7762 - DNA, 23 bp, Artificial Sequence
  HLA-A targeting gRNA
tctcagctgctccgccacacggg

SEQ ID NO: 7763 - DNA, 23 bp, Artificial Sequence
  HLA-A targeting gRNA
tctcagctgctccgccacccggg

SEQ ID NO: 7764 - DNA, 23 bp, Artificial Sequence
  HLA-A targeting gRNA
tctcagctgctccgccccacggg

SEQ ID NO: 7765 - DNA, 23 bp, Artificial Sequence
  HLA-A targeting gRNA
tctcagctgctccgccgcacggg

SEQ ID NO: 7766 - DNA, 23 bp, Artificial Sequence
  HLA-A targeting gRNA
tctcagctgctccgccgtacggg

SEQ ID NO: 7767 - DNA, 23 bp, Artificial Sequence
  HLA-A targeting gRNA
tctcagctgctccgcctcacggg

SEQ ID NO: 7768 - DNA, 23 bp, Artificial Sequence
  HLA-A targeting gRNA
tctcagctgctcggccgcacggg

SEQ ID NO: 7769 - DNA, 23 bp, Artificial Sequence
  HLA-A targeting gRNA
tctcaggctggtcacatgggtgg

SEQ ID NO: 7770 - DNA, 23 bp, Artificial Sequence
  HLA-A targeting gRNA
tctcagggtctcaggctccaagg

SEQ ID NO: 7771 - DNA, 23 bp, Artificial Sequence
  HLA-A targeting gRNA
tctcagggtctcaggctccgagg

SEQ ID NO: 7772 - DNA, 23 bp, Artificial Sequence
  HLA-A targeting gRNA
tctccacaagctcggtgtcctgg

SEQ ID NO: 7773 - DNA, 23 bp, Artificial Sequence
  HLA-A targeting gRNA
tctccacagggtagaaacccagg

SEQ ID NO: 7774 - DNA, 23 bp, Artificial Sequence
  HLA-A targeting gRNA
tctccacagggtagaagcccagg

SEQ ID NO: 7775 - DNA, 23 bp, Artificial Sequence
  HLA-A targeting gRNA
tctccactgctccgccgcacggg

SEQ ID NO: 7776 - DNA, 23 bp, Artificial Sequence
  HLA-A targeting gRNA
tctccactgctccgcctcacggg

SEQ ID NO: 7777 - DNA, 23 bp, Artificial Sequence
  HLA-A targeting gRNA
tctccccagacgccgagatgcgg

SEQ ID NO: 7778 - DNA, 23 bp, Artificial Sequence
  HLA-A targeting gRNA
tctccccagaggccgagatgcgg

SEQ ID NO: 7779 - DNA, 23 bp, Artificial Sequence
  HLA-A targeting gRNA
tctccccagggtagaagcccagg

SEQ ID NO: 7780 - DNA, 23 bp, Artificial Sequence
  HLA-A targeting gRNA
tctccgcagggtagaaacccagg

SEQ ID NO: 7781 - DNA, 23 bp, Artificial Sequence
  HLA-A targeting gRNA
tctccgcagggtagaagcacagg

SEQ ID NO: 7782 - DNA, 23 bp, Artificial Sequence
  HLA-A targeting gRNA
tctccgctgctccgccacacggg

SEQ ID NO: 7783 - DNA, 23 bp, Artificial Sequence
  HLA-A targeting gRNA
tctccgctgctccgcctcacagg

SEQ ID NO: 7784 - DNA, 23 bp, Artificial Sequence
  HLA-A targeting gRNA
tctccgctgctccgcctcaccgg

SEQ ID NO: 7785 - DNA, 23 bp, Artificial Sequence
  HLA-A targeting gRNA
tctccgctgctccgcctcacggg

SEQ ID NO: 7786 - DNA, 23 bp, Artificial Sequence
  HLA-A targeting gRNA
tctccggccgagggtctgggcgg

SEQ ID NO: 7787 - DNA, 23 bp, Artificial Sequence
  HLA-A targeting gRNA
tctccggtcgagggtctgggcgg

SEQ ID NO: 7788 - DNA, 23 bp, Artificial Sequence
  HLA-A targeting gRNA
tctccgtagggtagaagcccagg

SEQ ID NO: 7789 - DNA, 23 bp, Artificial Sequence
  HLA-A targeting gRNA
tctccgttgctccgcctcacggg

SEQ ID NO: 7790 - DNA, 23 bp, Artificial Sequence
  HLA-A targeting gRNA
tctcctcagacaccgagatgcgg

SEQ ID NO: 7791 - DNA, 23 bp, Artificial Sequence
  HLA-A targeting gRNA
tctcctcagacgccgagatgcgg

SEQ ID NO: 7792 - DNA, 23 bp, Artificial Sequence
  HLA-A targeting gRNA
tctcctgcgggctcttgaccagg

SEQ ID NO: 7793 - DNA, 23 bp, Artificial Sequence
  HLA-A targeting gRNA
tctctaggacaattaagggatgg

SEQ ID NO: 7794 - DNA, 23 bp, Artificial Sequence
  HLA-A targeting gRNA
tctctccacctcctcacattagg

SEQ ID NO: 7795 - DNA, 23 bp, Artificial Sequence
  HLA-A targeting gRNA
tctctccgtcagtctgtgcctgg

SEQ ID NO: 7796 - DNA, 23 bp, Artificial Sequence
  HLA-A targeting gRNA
tctctcggtcagtctgtgcctgg

SEQ ID NO: 7797 - DNA, 23 bp, Artificial Sequence
  HLA-A targeting gRNA
tctctgctgctccgccgcacggg

SEQ ID NO: 7798 - DNA, 23 bp, Artificial Sequence
  HLA-A targeting gRNA
tctctgggtctcaagctcccagg

SEQ ID NO: 7799 - DNA, 23 bp, Artificial Sequence
  HLA-A targeting gRNA
tctgagccgccgtgtccgccagg

SEQ ID NO: 7800 - DNA, 23 bp, Artificial Sequence
  HLA-A targeting gRNA
tctgaggagactctgagtccggg

SEQ ID NO: 7801 - DNA, 23 bp, Artificial Sequence
  HLA-A targeting gRNA
tctgaggagattctgagtccggg

SEQ ID NO: 7802 - DNA, 23 bp, Artificial Sequence
  HLA-A targeting gRNA
tctgaggagattttgagtccggg

SEQ ID NO: 7803 - DNA, 23 bp, Artificial Sequence
  HLA-A targeting gRNA
tctgagtccgggtgggtgactgg

SEQ ID NO: 7804 - DNA, 23 bp, Artificial Sequence
  HLA-A targeting gRNA
tctgagtccgggtgggtgcgtgg

SEQ ID NO: 7805 - DNA, 23 bp, Artificial Sequence
  HLA-A targeting gRNA
tctgagttttcttgtcccactgg

SEQ ID NO: 7806 - DNA, 23 bp, Artificial Sequence
  HLA-A targeting gRNA
tctgcactgctccgcctcacggg

SEQ ID NO: 7807 - DNA, 23 bp, Artificial Sequence
  HLA-A targeting gRNA
tctgccccacactcagtgtttgg

SEQ ID NO: 7808 - DNA, 23 bp, Artificial Sequence
  HLA-A targeting gRNA
tctgccgccttccccaccccagg

SEQ ID NO: 7809 - DNA, 23 bp, Artificial Sequence
  HLA-A targeting gRNA
tctgcgctcctggaccgccgcgg

SEQ ID NO: 7810 - DNA, 23 bp, Artificial Sequence
  HLA-A targeting gRNA
tctgcggtcgaggttctgggcgg

SEQ ID NO: 7811 - DNA, 23 bp, Artificial Sequence
  HLA-A targeting gRNA
tctgcgttcctggaccgccgcgg

SEQ ID NO: 7812 - DNA, 23 bp, Artificial Sequence
  HLA-A targeting gRNA
tctgctcccgatctgagtggagg

SEQ ID NO: 7813 - DNA, 23 bp, Artificial Sequence
  HLA-A targeting gRNA
tctgctcctgatctaagtggagg

SEQ ID NO: 7814 - DNA, 23 bp, Artificial Sequence
  HLA-A targeting gRNA
tctgctcctgatctgagtagagg

SEQ ID NO: 7815 - DNA, 23 bp, Artificial Sequence
  HLA-A targeting gRNA
tctgctcctgatctgagtggagg

SEQ ID NO: 7816 - DNA, 23 bp, Artificial Sequence
  HLA-A targeting gRNA
tctgctctctaggacaattaagg

SEQ ID NO: 7817 - DNA, 23 bp, Artificial Sequence
  HLA-A targeting gRNA
tctgctgtctaggacaattaagg

SEQ ID NO: 7818 - DNA, 23 bp, Artificial Sequence
  HLA-A targeting gRNA
tctggcatctctttctacaaagg

SEQ ID NO: 7819 - DNA, 23 bp, Artificial Sequence
  HLA-A targeting gRNA
tctggcatctctttctgcaaagg

SEQ ID NO: 7820 - DNA, 23 bp, Artificial Sequence
  HLA-A targeting gRNA
tctgggagctgaagtggtcgggg

SEQ ID NO: 7821 - DNA, 23 bp, Artificial Sequence
  HLA-A targeting gRNA
tctggggagaatccgagtccggg

SEQ ID NO: 7822 - DNA, 23 bp, Artificial Sequence
  HLA-A targeting gRNA
tctggggagaatctgagtccggg

SEQ ID NO: 7823 - DNA, 23 bp, Artificial Sequence
  HLA-A targeting gRNA
tctggggagaatgtgagtccggg

SEQ ID NO: 7824 - DNA, 23 bp, Artificial Sequence
  HLA-A targeting gRNA
tctggggagctgaagtggtcggg

SEQ ID NO: 7825 - DNA, 23 bp, Artificial Sequence
  HLA-A targeting gRNA
tctggggagctgaagtggtctgg

SEQ ID NO: 7826 - DNA, 23 bp, Artificial Sequence
  HLA-A targeting gRNA
tctggggcggggtggggcagagg

SEQ ID NO: 7827 - DNA, 23 bp, Artificial Sequence
  HLA-A targeting gRNA
tctggggggggggggggcagagg

SEQ ID NO: 7828 - DNA, 23 bp, Artificial Sequence
  HLA-A targeting gRNA
tctgggggtgggtggggcagagg

SEQ ID NO: 7829 - DNA, 23 bp, Artificial Sequence
  HLA-A targeting gRNA
tctgggggtgggtggggcagtgg

SEQ ID NO: 7830 - DNA, 23 bp, Artificial Sequence
  HLA-A targeting gRNA
tctgggttttcttgtcccactgg

SEQ ID NO: 7831 - DNA, 23 bp, Artificial Sequence
  HLA-A targeting gRNA
tctgggttttcttgttccactgg

SEQ ID NO: 7832 - DNA, 23 bp, Artificial Sequence
  HLA-A targeting gRNA
tctgggttttgttgtcccactgg

SEQ ID NO: 7833 - DNA, 23 bp, Artificial Sequence
  HLA-A targeting gRNA
tctggtagggaaggggtgagggg

SEQ ID NO: 7834 - DNA, 23 bp, Artificial Sequence
  HLA-A targeting gRNA
tctggttatagtagccgcgcagg

SEQ ID NO: 7835 - DNA, 23 bp, Artificial Sequence
  HLA-A targeting gRNA
tctggttgtagtagccaagcagg

SEQ ID NO: 7836 - DNA, 23 bp, Artificial Sequence
  HLA-A targeting gRNA
tctggttgtagtagcggagcagg

SEQ ID NO: 7837 - DNA, 23 bp, Artificial Sequence
  HLA-A targeting gRNA
tctggttgtagtagctgcgcagg

SEQ ID NO: 7838 - DNA, 23 bp, Artificial Sequence
  HLA-A targeting gRNA
tctggttgtagtggccgcgcagg

SEQ ID NO: 7839 - DNA, 23 bp, Artificial Sequence
  HLA-A targeting gRNA
tctgtcctgctccgccacacggg

SEQ ID NO: 7840 - DNA, 23 bp, Artificial Sequence
  HLA-A targeting gRNA
tctgtcctgctccgccatacggg

SEQ ID NO: 7841 - DNA, 23 bp, Artificial Sequence
  HLA-A targeting gRNA
tctgtcctgctccgccgcacggg

SEQ ID NO: 7842 - DNA, 23 bp, Artificial Sequence
  HLA-A targeting gRNA
tctgttcctgatctgagtggagg

SEQ ID NO: 7843 - DNA, 23 bp, Artificial Sequence
  HLA-A targeting gRNA
tcttagctgctccgccacacggg

SEQ ID NO: 7844 - DNA, 23 bp, Artificial Sequence
  HLA-A targeting gRNA
tcttcccctccatttcctcaagg

SEQ ID NO: 7845 - DNA, 23 bp, Artificial Sequence
  HLA-A targeting gRNA
tcttcccctccatttcctcaggg

SEQ ID NO: 7846 - DNA, 23 bp, Artificial Sequence
  HLA-A targeting gRNA
tcttctctctagacaattaaggg

SEQ ID NO: 7847 - DNA, 23 bp, Artificial Sequence
  HLA-A targeting gRNA
tcttctctctaggacaattaagg

SEQ ID NO: 7848 - DNA, 23 bp, Artificial Sequence
  HLA-A targeting gRNA
tcttgaagatctgtgtctcccgg

SEQ ID NO: 7849 - DNA, 23 bp, Artificial Sequence
  HLA-A targeting gRNA
tcttgaagatctgtgtgttccgg

SEQ ID NO: 7850 - DNA, 23 bp, Artificial Sequence
  HLA-A targeting gRNA
tcttgaagatctgtgtgttcggg

SEQ ID NO: 7851 - DNA, 23 bp, Artificial Sequence
  HLA-A targeting gRNA
tcttgcagatctgtgtctcccgg

SEQ ID NO: 7852 - DNA, 23 bp, Artificial Sequence
  HLA-A targeting gRNA
tcttgcagatctgtgtgttccgg

SEQ ID NO: 7853 - DNA, 23 bp, Artificial Sequence
  HLA-A targeting gRNA
tcttggagatctctgtctcccgg

SEQ ID NO: 7854 - DNA, 23 bp, Artificial Sequence
  HLA-A targeting gRNA
tcttggagatctgtgtctcccgg

SEQ ID NO: 7855 - DNA, 23 bp, Artificial Sequence
  HLA-A targeting gRNA
tcttggagatctgtgtgttccgg

SEQ ID NO: 7856 - DNA, 23 bp, Artificial Sequence
  HLA-A targeting gRNA
tcttggggtctagagtgggcagg

SEQ ID NO: 7857 - DNA, 23 bp, Artificial Sequence
  HLA-A targeting gRNA
tcttggggtctagagtgggcggg

SEQ ID NO: 7858 - DNA, 23 bp, Artificial Sequence
  HLA-A targeting gRNA
tcttggggtctagagtgggtggg

SEQ ID NO: 7859 - DNA, 23 bp, Artificial Sequence
  HLA-A targeting gRNA
tcttgtagatctgtgtgttccgg

SEQ ID NO: 7860 - DNA, 23 bp, Artificial Sequence
  HLA-A targeting gRNA
tcttgtcccacatctcctgcggg

SEQ ID NO: 7861 - DNA, 23 bp, Artificial Sequence
  HLA-A targeting gRNA
tcttgtcccacatctcctgtggg

SEQ ID NO: 7862 - DNA, 23 bp, Artificial Sequence
  HLA-A targeting gRNA
tgaaaccgggtaaacgcgcctgg

SEQ ID NO: 7863 - DNA, 23 bp, Artificial Sequence
  HLA-A targeting gRNA
tgaaaccgggtaaaggcgactgg

SEQ ID NO: 7864 - DNA, 23 bp, Artificial Sequence
  HLA-A targeting gRNA
tgaaaccgggtaaaggtgactgg

SEQ ID NO: 7865 - DNA, 23 bp, Artificial Sequence
  HLA-A targeting gRNA
tgaaaccgggtaaagtcgcctgg

SEQ ID NO: 7866 - DNA, 23 bp, Artificial Sequence
  HLA-A targeting gRNA
tgaacgaggacctaagctcctgg

SEQ ID NO: 7867 - DNA, 23 bp, Artificial Sequence
  HLA-A targeting gRNA
tgaacgaggacctgagctcccgg

SEQ ID NO: 7868 - DNA, 23 bp, Artificial Sequence
  HLA-A targeting gRNA
tgaacgaggacctgagctcctgg

SEQ ID NO: 7869 - DNA, 23 bp, Artificial Sequence
  HLA-A targeting gRNA
tgaacgaggacctgccctcctgg

SEQ ID NO: 7870 - DNA, 23 bp, Artificial Sequence
  HLA-A targeting gRNA
tgaacgaggatctgcgctcctgg

SEQ ID NO: 7871 - DNA, 23 bp, Artificial Sequence
  HLA-A targeting gRNA
tgaacgaggatctgcgttcctgg

SEQ ID NO: 7872 - DNA, 23 bp, Artificial Sequence
  HLA-A targeting gRNA
tgaagaaatacttcatggagtgg

SEQ ID NO: 7873 - DNA, 23 bp, Artificial Sequence
  HLA-A targeting gRNA
tgaagcacatgtgacaatgaagg

SEQ ID NO: 7874 - DNA, 23 bp, Artificial Sequence
  HLA-A targeting gRNA
tgaagtccctgaggaaatggagg

SEQ ID NO: 7875 - DNA, 23 bp, Artificial Sequence
  HLA-A targeting gRNA
tgaagtccttgaggaaatggagg

SEQ ID NO: 7876 - DNA, 23 bp, Artificial Sequence
  HLA-A targeting gRNA
tgaagtctctgaggaaatggagg

SEQ ID NO: 7877 - DNA, 23 bp, Artificial Sequence
  HLA-A targeting gRNA
tgaatgaggacctgcgctcctgg

SEQ ID NO: 7878 - DNA, 23 bp, Artificial Sequence
  HLA-A targeting gRNA
tgacatctctgaggaaatggagg

SEQ ID NO: 7879 - DNA, 23 bp, Artificial Sequence
  HLA-A targeting gRNA
tgaccaacccgcggggattttgg

SEQ ID NO: 7880 - DNA, 23 bp, Artificial Sequence
  HLA-A targeting gRNA
tgaccacgggggcggggccaggg

SEQ ID NO: 7881 - DNA, 23 bp, Artificial Sequence
  HLA-A targeting gRNA
tgaccagcctgagaatggacagg

SEQ ID NO: 7882 - DNA, 23 bp, Artificial Sequence
  HLA-A targeting gRNA
tgaccagcctgagaatggacggg

SEQ ID NO: 7883 - DNA, 23 bp, Artificial Sequence
  HLA-A targeting gRNA
tgaccagcctgagaatgggcagg

SEQ ID NO: 7884 - DNA, 23 bp, Artificial Sequence
  HLA-A targeting gRNA
tgaccatcctgagaacggacagg

SEQ ID NO: 7885 - DNA, 23 bp, Artificial Sequence
  HLA-A targeting gRNA
tgaccatcctgagaatggacagg

SEQ ID NO: 7886 - DNA, 23 bp, Artificial Sequence
  HLA-A targeting gRNA
tgacccagctgaagggctccagg

SEQ ID NO: 7887 - DNA, 23 bp, Artificial Sequence
  HLA-A targeting gRNA
tgacccgcatctcggcctctggg

SEQ ID NO: 7888 - DNA, 23 bp, Artificial Sequence
  HLA-A targeting gRNA
tgacccgcatctcggcgtctggg

SEQ ID NO: 7889 - DNA, 23 bp, Artificial Sequence
  HLA-A targeting gRNA
tgacccggctgaagggctccagg

SEQ ID NO: 7890 - DNA, 23 bp, Artificial Sequence
  HLA-A targeting gRNA
tgaccgcgagggctgggccaggg

SEQ ID NO: 7891 - DNA, 23 bp, Artificial Sequence
  HLA-A targeting gRNA
tgaccgcggggccggggccaggg

SEQ ID NO: 7892 - DNA, 23 bp, Artificial Sequence
  HLA-A targeting gRNA
tgaccgcggggcctaggccaggg

SEQ ID NO: 7893 - DNA, 23 bp, Artificial Sequence
  HLA-A targeting gRNA
tgaccgcggggcctgggccaggg

SEQ ID NO: 7894 - DNA, 23 bp, Artificial Sequence
  HLA-A targeting gRNA
tgaccgcgggggcggggccaggg

SEQ ID NO: 7895 - DNA, 23 bp, Artificial Sequence
  HLA-A targeting gRNA
tgacctcatggtcagagatgggg

SEQ ID NO: 7896 - DNA, 23 bp, Artificial Sequence
  HLA-A targeting gRNA
tgacctggctgaagggctccagg

SEQ ID NO: 7897 - DNA, 23 bp, Artificial Sequence
  HLA-A targeting gRNA
tgacgtctctgaggaaatggagg

SEQ ID NO: 7898 - DNA, 23 bp, Artificial Sequence
  HLA-A targeting gRNA
tgacgtctctgaggaaatgtagg

SEQ ID NO: 7899 - DNA, 23 bp, Artificial Sequence
  HLA-A targeting gRNA
tgactatcctgagaatggacagg

SEQ ID NO: 7900 - DNA, 23 bp, Artificial Sequence
  HLA-A targeting gRNA
tgactcatgatgctggaatcagg

SEQ ID NO: 7901 - DNA, 23 bp, Artificial Sequence
  HLA-A targeting gRNA
tgactggggacttcagaaccggg

SEQ ID NO: 7902 - DNA, 23 bp, Artificial Sequence
  HLA-A targeting gRNA
tgactggggactttagaaccggg

SEQ ID NO: 7903 - DNA, 23 bp, Artificial Sequence
  HLA-A targeting gRNA
tgactggggactttagaacctgg

SEQ ID NO: 7904 - DNA, 23 bp, Artificial Sequence
  HLA-A targeting gRNA
tgactggtgactttagaaccggg

SEQ ID NO: 7905 - DNA, 23 bp, Artificial Sequence
  HLA-A targeting gRNA
tgactttagaaccgggactgcgg

SEQ ID NO: 7906 - DNA, 23 bp, Artificial Sequence
  HLA-A targeting gRNA
tgagaaccccgcccgggacctgg

SEQ ID NO: 7907 - DNA, 23 bp, Artificial Sequence
  HLA-A targeting gRNA
tgagaacggacaggacacctggg

SEQ ID NO: 7908 - DNA, 23 bp, Artificial Sequence
  HLA-A targeting gRNA
tgagaatggacgggacacctggg

SEQ ID NO: 7909 - DNA, 23 bp, Artificial Sequence
  HLA-A targeting gRNA
tgagaatgggcaggacacctggg

SEQ ID NO: 7910 - DNA, 23 bp, Artificial Sequence
  HLA-A targeting gRNA
tgagagactcatcagagccctgg

SEQ ID NO: 7911 - DNA, 23 bp, Artificial Sequence
  HLA-A targeting gRNA
tgagagccccgcccgggacctgg

SEQ ID NO: 7912 - DNA, 23 bp, Artificial Sequence
  HLA-A targeting gRNA
tgagagccccgcccggggcctgg

SEQ ID NO: 7913 - DNA, 23 bp, Artificial Sequence
  HLA-A targeting gRNA
tgagagccccgtccgggacatgg

SEQ ID NO: 7914 - DNA, 23 bp, Artificial Sequence
  HLA-A targeting gRNA
tgagagccccgtccgggacctgg

SEQ ID NO: 7915 - DNA, 23 bp, Artificial Sequence
  HLA-A targeting gRNA
tgagatccaccccgaggctgcgg

SEQ ID NO: 7916 - DNA, 23 bp, Artificial Sequence
  HLA-A targeting gRNA
tgagatcctccccgaggctgcgg

SEQ ID NO: 7917 - DNA, 23 bp, Artificial Sequence
  HLA-A targeting gRNA
tgagattctgggagctgaagtgg

SEQ ID NO: 7918 - DNA, 23 bp, Artificial Sequence
  HLA-A targeting gRNA
tgagcatgaggcagagaacaagg

SEQ ID NO: 7919 - DNA, 23 bp, Artificial Sequence
  HLA-A targeting gRNA
tgagcgtcaggcagagaacaagg

SEQ ID NO: 7920 - DNA, 23 bp, Artificial Sequence
  HLA-A targeting gRNA
tgagcgtgaggcagagaacaagg

SEQ ID NO: 7921 - DNA, 23 bp, Artificial Sequence
  HLA-A targeting gRNA
tgagctcctggcggacacggcgg

SEQ ID NO: 7922 - DNA, 23 bp, Artificial Sequence
  HLA-A targeting gRNA
tgagcttgtggagaccagaccgg

SEQ ID NO: 7923 - DNA, 23 bp, Artificial Sequence
  HLA-A targeting gRNA
tgaggagccgcgccgggaggagg

SEQ ID NO: 7924 - DNA, 23 bp, Artificial Sequence
  HLA-A targeting gRNA
tgagggcactgggaggaagcagg

SEQ ID NO: 7925 - DNA, 23 bp, Artificial Sequence
  HLA-A targeting gRNA
tgaggggacagggaggaggcagg

SEQ ID NO: 7926 - DNA, 23 bp, Artificial Sequence
  HLA-A targeting gRNA
tgaggggacagggaggagtcagg

SEQ ID NO: 7927 - DNA, 23 bp, Artificial Sequence
  HLA-A targeting gRNA
tgaggggactgggaggaagcagg

SEQ ID NO: 7928 - DNA, 23 bp, Artificial Sequence
  HLA-A targeting gRNA
tgaggggactgggaggaggcagg

SEQ ID NO: 7929 - DNA, 23 bp, Artificial Sequence
  HLA-A targeting gRNA
tgaggggcttcggtaaggagggg

SEQ ID NO: 7930 - DNA, 23 bp, Artificial Sequence
  HLA-A targeting gRNA
tgaggtcaccctgaggtgctggg

SEQ ID NO: 7931 - DNA, 23 bp, Artificial Sequence
  HLA-A targeting gRNA
tgagtatgaggcagagaacaagg

SEQ ID NO: 7932 - DNA, 23 bp, Artificial Sequence
  HLA-A targeting gRNA
tgagtccgggtgggtgactgggg

SEQ ID NO: 7933 - DNA, 23 bp, Artificial Sequence
  HLA-A targeting gRNA
tgagtccgggtgggtgcgtgggg

SEQ ID NO: 7934 - DNA, 23 bp, Artificial Sequence
  HLA-A targeting gRNA
tgagtctctcatcgcttgtaagg

SEQ ID NO: 7935 - DNA, 23 bp, Artificial Sequence
  HLA-A targeting gRNA
tgagtgtgaggcagagaacaagg

SEQ ID NO: 7936 - DNA, 23 bp, Artificial Sequence
  HLA-A targeting gRNA
tgagtgtggggcagagaacaagg

SEQ ID NO: 7937 - DNA, 23 bp, Artificial Sequence
  HLA-A targeting gRNA
tgagttttcttgtcccactgggg

SEQ ID NO: 7938 - DNA, 23 bp, Artificial Sequence
  HLA-A targeting gRNA
tgatgaagcggggctccccgcgg

SEQ ID NO: 7939 - DNA, 23 bp, Artificial Sequence
  HLA-A targeting gRNA
tgatgccggtgggcgtgtggagg

SEQ ID NO: 7940 - DNA, 23 bp, Artificial Sequence
  HLA-A targeting gRNA
tgatggcagtgggcgtgtggagg

SEQ ID NO: 7941 - DNA, 23 bp, Artificial Sequence
  HLA-A targeting gRNA
tgatggcggcaggcgtgtggagg

SEQ ID NO: 7942 - DNA, 23 bp, Artificial Sequence
  HLA-A targeting gRNA
tgatggcggcgggcgtgtggagg

SEQ ID NO: 7943 - DNA, 23 bp, Artificial Sequence
  HLA-A targeting gRNA
tgatggcggtggccgtgtggagg

SEQ ID NO: 7944 - DNA, 23 bp, Artificial Sequence
  HLA-A targeting gRNA
tgatggcggtgggcgtgtggagg

SEQ ID NO: 7945 - DNA, 23 bp, Artificial Sequence
  HLA-A targeting gRNA
tgatggctgttgtgatgtgtagg

SEQ ID NO: 7946 - DNA, 23 bp, Artificial Sequence
  HLA-A targeting gRNA
tgatgggggcgggagtgtgaagg

SEQ ID NO: 7947 - DNA, 23 bp, Artificial Sequence
  HLA-A targeting gRNA
tgatgggggcgggagtgtggagg

SEQ ID NO: 7948 - DNA, 23 bp, Artificial Sequence
  HLA-A targeting gRNA
tgatgggggtgggagtgtgaagg

SEQ ID NO: 7949 - DNA, 23 bp, Artificial Sequence
  HLA-A targeting gRNA
tgatgggggtgggagtgtggagg

SEQ ID NO: 7950 - DNA, 23 bp, Artificial Sequence
  HLA-A targeting gRNA
tgattccagcatcatgagtcagg

SEQ ID NO: 7951 - DNA, 23 bp, Artificial Sequence
  HLA-A targeting gRNA
tgattccagcattcatgagtcgg

SEQ ID NO: 7952 - DNA, 23 bp, Artificial Sequence
  HLA-A targeting gRNA
tgcagcacatgtgacaatgaagg

SEQ ID NO: 7953 - DNA, 23 bp, Artificial Sequence
  HLA-A targeting gRNA
tgcagccacacatccactggagg

SEQ ID NO: 7954 - DNA, 23 bp, Artificial Sequence
  HLA-A targeting gRNA
tgcagggaacacttctacctggg

SEQ ID NO: 7955 - DNA, 23 bp, Artificial Sequence
  HLA-A targeting gRNA
tgcatcccagtaatgaggcaggg

SEQ ID NO: 7956 - DNA, 23 bp, Artificial Sequence
  HLA-A targeting gRNA
tgcatgtaagtgatggcggtggg

SEQ ID NO: 7957 - DNA, 23 bp, Artificial Sequence
  HLA-A targeting gRNA
tgccattctccattcaacggagg

SEQ ID NO: 7958 - DNA, 23 bp, Artificial Sequence
  HLA-A targeting gRNA
tgccattctccattcaagggagg

SEQ ID NO: 7959 - DNA, 23 bp, Artificial Sequence
  HLA-A targeting gRNA
tgccccacactcagtgtttgggg

SEQ ID NO: 7960 - DNA, 23 bp, Artificial Sequence
  HLA-A targeting gRNA
tgcccgcccggcgagggcgcagg

SEQ ID NO: 7961 - DNA, 23 bp, Artificial Sequence
  HLA-A targeting gRNA
tgccctatgaggggactgggagg

SEQ ID NO: 7962 - DNA, 23 bp, Artificial Sequence
  HLA-A targeting gRNA
tgccctgtgaggggacagggagg

SEQ ID NO: 7963 - DNA, 23 bp, Artificial Sequence
  HLA-A targeting gRNA
tgccctgtgaggggactgggagg

SEQ ID NO: 7964 - DNA, 23 bp, Artificial Sequence
  HLA-A targeting gRNA
tgccgtcgtaggcgtcctggtgg

SEQ ID NO: 7965 - DNA, 23 bp, Artificial Sequence
  HLA-A targeting gRNA
tgcctcacactcagtgtgtttgg

SEQ ID NO: 7966 - DNA, 23 bp, Artificial Sequence
  HLA-A targeting gRNA
tgcctgcatccgctggtgtctgg

SEQ ID NO: 7967 - DNA, 23 bp, Artificial Sequence
  HLA-A targeting gRNA
tgcctgcgtccgctggtgtctgg

SEQ ID NO: 7968 - DNA, 23 bp, Artificial Sequence
  HLA-A targeting gRNA
tgcggagccactccacacacagg

SEQ ID NO: 7969 - DNA, 23 bp, Artificial Sequence
  HLA-A targeting gRNA
tgcggagccactcctcgcacagg

SEQ ID NO: 7970 - DNA, 23 bp, Artificial Sequence
  HLA-A targeting gRNA
tgcggagcgaccccacgcacagg

SEQ ID NO: 7971 - DNA, 23 bp, Artificial Sequence
  HLA-A targeting gRNA
tgcggagcgactccacgcacagg

SEQ ID NO: 7972 - DNA, 23 bp, Artificial Sequence
  HLA-A targeting gRNA
tgcggtcccctcgctcctcccgg

SEQ ID NO: 7973 - DNA, 23 bp, Artificial Sequence
  HLA-A targeting gRNA
tgcgtccagcgacagtgcccagg

SEQ ID NO: 7974 - DNA, 23 bp, Artificial Sequence
  HLA-A targeting gRNA
tgcgtggggactttagaactggg

SEQ ID NO: 7975 - DNA, 23 bp, Artificial Sequence
  HLA-A targeting gRNA
tgcgtgtaaatgatggcggcggg

SEQ ID NO: 7976 - DNA, 23 bp, Artificial Sequence
  HLA-A targeting gRNA
tgcgtgtaagtgatgccggtggg

SEQ ID NO: 7977 - DNA, 23 bp, Artificial Sequence
  HLA-A targeting gRNA
tgcgtgtaagtgatggcagtggg

SEQ ID NO: 7978 - DNA, 23 bp, Artificial Sequence
  HLA-A targeting gRNA
tgcgtgtaagtgatggcggcagg

SEQ ID NO: 7979 - DNA, 23 bp, Artificial Sequence
  HLA-A targeting gRNA
tgcgtgtaagtgatggcggcggg

SEQ ID NO: 7980 - DNA, 23 bp, Artificial Sequence
  HLA-A targeting gRNA
tgcgtgtaagtgatggcggtggg

SEQ ID NO: 7981 - DNA, 23 bp, Artificial Sequence
  HLA-A targeting gRNA
tgcgtgtaagtgatgggggcggg

SEQ ID NO: 7982 - DNA, 23 bp, Artificial Sequence
  HLA-A targeting gRNA
tgcgtgtaagtgatgggggtggg

SEQ ID NO: 7983 - DNA, 23 bp, Artificial Sequence
  HLA-A targeting gRNA
tgcgtgtaagtggtgggggtggg

SEQ ID NO: 7984 - DNA, 23 bp, Artificial Sequence
  HLA-A targeting gRNA
tgctaaggacagaccttaggagg

SEQ ID NO: 7985 - DNA, 23 bp, Artificial Sequence
  HLA-A targeting gRNA
tgctccacccacggcgcccgcgg

SEQ ID NO: 7986 - DNA, 23 bp, Artificial Sequence
  HLA-A targeting gRNA
tgctccacccacggcgcccgggg

SEQ ID NO: 7987 - DNA, 23 bp, Artificial Sequence
  HLA-A targeting gRNA
tgctccacccacggcgcctgcgg

SEQ ID NO: 7988 - DNA, 23 bp, Artificial Sequence
  HLA-A targeting gRNA
tgctccacccacggctcccgcgg

SEQ ID NO: 7989 - DNA, 23 bp, Artificial Sequence
  HLA-A targeting gRNA
tgctccatccacggctcccgcgg

SEQ ID NO: 7990 - DNA, 23 bp, Artificial Sequence
  HLA-A targeting gRNA
tgctctatccaccgcgcccgcgg

SEQ ID NO: 7991 - DNA, 23 bp, Artificial Sequence
  HLA-A targeting gRNA
tgctctatccacggcgcccgggg

SEQ ID NO: 7992 - DNA, 23 bp, Artificial Sequence
  HLA-A targeting gRNA
tgctctatccagggcgcccgcgg

SEQ ID NO: 7993 - DNA, 23 bp, Artificial Sequence
  HLA-A targeting gRNA
tgctctatccatggcgcccaggg

SEQ ID NO: 7994 - DNA, 23 bp, Artificial Sequence
  HLA-A targeting gRNA
tgctctatccatggcgcccgcgg

SEQ ID NO: 7995 - DNA, 23 bp, Artificial Sequence
  HLA-A targeting gRNA
tgctctatccatggcgcccgggg

SEQ ID NO: 7996 - DNA, 23 bp, Artificial Sequence
  HLA-A targeting gRNA
tgctctatccatggctcccgggg

SEQ ID NO: 7997 - DNA, 23 bp, Artificial Sequence
  HLA-A targeting gRNA
tgctggcctggctgtccttgtgg

SEQ ID NO: 7998 - DNA, 23 bp, Artificial Sequence
  HLA-A targeting gRNA
tgcttcccagtaatgaggcaggg

SEQ ID NO: 7999 - DNA, 23 bp, Artificial Sequence
  HLA-A targeting gRNA
tgcttcccagtaatgatgcaggg

SEQ ID NO: 8000 - DNA, 23 bp, Artificial Sequence
  HLA-A targeting gRNA
tggaaagttctagtctctgaggg

SEQ ID NO: 8001 - DNA, 23 bp, Artificial Sequence
  HLA-A targeting gRNA
tggaagaagaagtgaaactcagg

SEQ ID NO: 8002 - DNA, 23 bp, Artificial Sequence
  HLA-A targeting gRNA
tggaagcaccatccacacatggg

SEQ ID NO: 8003 - DNA, 23 bp, Artificial Sequence
  HLA-A targeting gRNA
tggaagcaccatccacacctggg

SEQ ID NO: 8004 - DNA, 23 bp, Artificial Sequence
  HLA-A targeting gRNA
tggaagcaccatccacacgtggg

SEQ ID NO: 8005 - DNA, 23 bp, Artificial Sequence
  HLA-A targeting gRNA
tggaagcctgggggcgaggaggg

SEQ ID NO: 8006 - DNA, 23 bp, Artificial Sequence
  HLA-A targeting gRNA
tggaaggttccatctcctgctgg

SEQ ID NO: 8007 - DNA, 23 bp, Artificial Sequence
  HLA-A targeting gRNA
tggaaggttctatctcctgcagg

SEQ ID NO: 8008 - DNA, 23 bp, Artificial Sequence
  HLA-A targeting gRNA
tggaaggttctatctcctgccgg

SEQ ID NO: 8009 - DNA, 23 bp, Artificial Sequence
  HLA-A targeting gRNA
tggaaggttctatctcctgctgg

SEQ ID NO: 8010 - DNA, 23 bp, Artificial Sequence
  HLA-A targeting gRNA
tggaaggttctgtctcctgctgg

SEQ ID NO: 8011 - DNA, 23 bp, Artificial Sequence
  HLA-A targeting gRNA
tggacaggacacctggggtaggg

SEQ ID NO: 8012 - DNA, 23 bp, Artificial Sequence
  HLA-A targeting gRNA
tggacaggacacctggggtgggg

SEQ ID NO: 8013 - DNA, 23 bp, Artificial Sequence
  HLA-A targeting gRNA
tggacaggacacctggtgtgggg

SEQ ID NO: 8014 - DNA, 23 bp, Artificial Sequence
  HLA-A targeting gRNA
tggaccggtgagtgcggggttgg

SEQ ID NO: 8015 - DNA, 23 bp, Artificial Sequence
  HLA-A targeting gRNA
tggacgacaagcagttcgtgagg

SEQ ID NO: 8016 - DNA, 23 bp, Artificial Sequence
  HLA-A targeting gRNA
tggacgacacccagttcgtgagg

SEQ ID NO: 8017 - DNA, 23 bp, Artificial Sequence
  HLA-A targeting gRNA
tggacgacacgcacttcgtgcgg

SEQ ID NO: 8018 - DNA, 23 bp, Artificial Sequence
  HLA-A targeting gRNA
tggacgacacgcagttcatgagg

SEQ ID NO: 8019 - DNA, 23 bp, Artificial Sequence
  HLA-A targeting gRNA
tggacgacacgcagttcgcgcgg

SEQ ID NO: 8020 - DNA, 23 bp, Artificial Sequence
  HLA-A targeting gRNA
tggacgacacgcagttcgtgagg

SEQ ID NO: 8021 - DNA, 23 bp, Artificial Sequence
  HLA-A targeting gRNA
tggacgacacgcagtttgtgcgg

SEQ ID NO: 8022 - DNA, 23 bp, Artificial Sequence
  HLA-A targeting gRNA
tggacgacacgctgttcatgagg

SEQ ID NO: 8023 - DNA, 23 bp, Artificial Sequence
  HLA-A targeting gRNA
tggacgacacgctgttcgtgagg

SEQ ID NO: 8024 - DNA, 23 bp, Artificial Sequence
  HLA-A targeting gRNA
tggacgacacgctgttggtgagg

SEQ ID NO: 8025 - DNA, 23 bp, Artificial Sequence
  HLA-A targeting gRNA
tggacgaggacctgcgctcctgg

SEQ ID NO: 8026 - DNA, 23 bp, Artificial Sequence
  HLA-A targeting gRNA
tggacgatacgcagttcgtgcgg

SEQ ID NO: 8027 - DNA, 23 bp, Artificial Sequence
  HLA-A targeting gRNA
tggacggcacccagttcgtgagg

SEQ ID NO: 8028 - DNA, 23 bp, Artificial Sequence
  HLA-A targeting gRNA
tggacgggacacctggggtgggg

SEQ ID NO: 8029 - DNA, 23 bp, Artificial Sequence
  HLA-A targeting gRNA
tggactacacgcagttcgtgcgg

SEQ ID NO: 8030 - DNA, 23 bp, Artificial Sequence
  HLA-A targeting gRNA
tggactgcggagacgctgattgg

SEQ ID NO: 8031 - DNA, 23 bp, Artificial Sequence
  HLA-A targeting gRNA
tggactgggaagacggctccggg

SEQ ID NO: 8032 - DNA, 23 bp, Artificial Sequence
  HLA-A targeting gRNA
tggactgggaagacggctctggg

SEQ ID NO: 8033 - DNA, 23 bp, Artificial Sequence
  HLA-A targeting gRNA
tggactgggaagatggctctggg

SEQ ID NO: 8034 - DNA, 23 bp, Artificial Sequence
  HLA-A targeting gRNA
tggagaaacacctcatggagtgg

SEQ ID NO: 8035 - DNA, 23 bp, Artificial Sequence
  HLA-A targeting gRNA
tggagaaatacgtcatggagtgg

SEQ ID NO: 8036 - DNA, 23 bp, Artificial Sequence
  HLA-A targeting gRNA
tggagcccctcaccctgagatgg

SEQ ID NO: 8037 - DNA, 23 bp, Artificial Sequence
  HLA-A targeting gRNA
tggagcccttcagcagggtcagg

SEQ ID NO: 8038 - DNA, 23 bp, Artificial Sequence
  HLA-A targeting gRNA
tggagcccttcagcagggtcggg

SEQ ID NO: 8039 - DNA, 23 bp, Artificial Sequence
  HLA-A targeting gRNA
tggagcccttcagccaggtcagg

SEQ ID NO: 8040 - DNA, 23 bp, Artificial Sequence
  HLA-A targeting gRNA
tggagcccttcagccgggtcagg

SEQ ID NO: 8041 - DNA, 23 bp, Artificial Sequence
  HLA-A targeting gRNA
tggagcccttcagctgggtcagg

SEQ ID NO: 8042 - DNA, 23 bp, Artificial Sequence
  HLA-A targeting gRNA
tggaggacacgtgcgtggagtgg

SEQ ID NO: 8043 - DNA, 23 bp, Artificial Sequence
  HLA-A targeting gRNA
tggaggaggggccggagtattgg

SEQ ID NO: 8044 - DNA, 23 bp, Artificial Sequence
  HLA-A targeting gRNA
tggagggaacgtgcgtggagtgg

SEQ ID NO: 8045 - DNA, 23 bp, Artificial Sequence
  HLA-A targeting gRNA
tggagggcaagtgcgtggagtgg

SEQ ID NO: 8046 - DNA, 23 bp, Artificial Sequence
  HLA-A targeting gRNA
tggagggcacgcgcgtggagtgg

SEQ ID NO: 8047 - DNA, 23 bp, Artificial Sequence
  HLA-A targeting gRNA
tggagggcacgtacgtggagtgg

SEQ ID NO: 8048 - DNA, 23 bp, Artificial Sequence
  HLA-A targeting gRNA
tggagggcacgtgagtggagtgg

SEQ ID NO: 8049 - DNA, 23 bp, Artificial Sequence
  HLA-A targeting gRNA
tggagggcacgtgcatggagtgg

SEQ ID NO: 8050 - DNA, 23 bp, Artificial Sequence
  HLA-A targeting gRNA
tggagggcacgtgtgtggagtgg

SEQ ID NO: 8051 - DNA, 23 bp, Artificial Sequence
  HLA-A targeting gRNA
tggagggcacgttcgtggagtgg

SEQ ID NO: 8052 - DNA, 23 bp, Artificial Sequence
  HLA-A targeting gRNA
tggagggcctgtgcgaggagtgg

SEQ ID NO: 8053 - DNA, 23 bp, Artificial Sequence
  HLA-A targeting gRNA
tggagggcctgtgtgtggagtgg

SEQ ID NO: 8054 - DNA, 23 bp, Artificial Sequence
  HLA-A targeting gRNA
tggagggcgagtgcgtggagtgg

SEQ ID NO: 8055 - DNA, 23 bp, Artificial Sequence
  HLA-A targeting gRNA
tggaggggaagacagtccctagg

SEQ ID NO: 8056 - DNA, 23 bp, Artificial Sequence
  HLA-A targeting gRNA
tggagtaaggagggggatgaggg

SEQ ID NO: 8057 - DNA, 23 bp, Artificial Sequence
  HLA-A targeting gRNA
tggagtgggagcctggggcaagg

SEQ ID NO: 8058 - DNA, 23 bp, Artificial Sequence
  HLA-A targeting gRNA
tggatgtacggctgcgacctggg

SEQ ID NO: 8059 - DNA, 23 bp, Artificial Sequence
  HLA-A targeting gRNA
tggatgtatggctgcgacctggg

SEQ ID NO: 8060 - DNA, 23 bp, Artificial Sequence
  HLA-A targeting gRNA
tggatgtatggctgcgacgtggg

SEQ ID NO: 8061 - DNA, 23 bp, Artificial Sequence
  HLA-A targeting gRNA
tggatgtgagaccctggccccgg

SEQ ID NO: 8062 - DNA, 23 bp, Artificial Sequence
  HLA-A targeting gRNA
tggatgtgtggctgcaacctggg

SEQ ID NO: 8063 - DNA, 23 bp, Artificial Sequence
  HLA-A targeting gRNA
tggatgtgtggctgcgacctggg

SEQ ID NO: 8064 - DNA, 23 bp, Artificial Sequence
  HLA-A targeting gRNA
tggatgtttggctgcgacctggg

SEQ ID NO: 8065 - DNA, 23 bp, Artificial Sequence
  HLA-A targeting gRNA
tggatgtttggctgcgaccttgg

SEQ ID NO: 8066 - DNA, 23 bp, Artificial Sequence
  HLA-A targeting gRNA
tggattgggaagatggctctggg

SEQ ID NO: 8067 - DNA, 23 bp, Artificial Sequence
  HLA-A targeting gRNA
tggcacacagggtcccaggctgg

SEQ ID NO: 8068 - DNA, 23 bp, Artificial Sequence
  HLA-A targeting gRNA
tggcaggtctgggggtgggtggg

SEQ ID NO: 8069 - DNA, 23 bp, Artificial Sequence
  HLA-A targeting gRNA
tggccgcggggccggggccaggg

SEQ ID NO: 8070 - DNA, 23 bp, Artificial Sequence
  HLA-A targeting gRNA
tggcctcatggtcagagacgggg

SEQ ID NO: 8071 - DNA, 23 bp, Artificial Sequence
  HLA-A targeting gRNA
tggcctcatggtcagagaggggg

SEQ ID NO: 8072 - DNA, 23 bp, Artificial Sequence
  HLA-A targeting gRNA
tggcctccaacgagaagaagagg

SEQ ID NO: 8073 - DNA, 23 bp, Artificial Sequence
  HLA-A targeting gRNA
tggcctcccacgagaagaagagg

SEQ ID NO: 8074 - DNA, 23 bp, Artificial Sequence
  HLA-A targeting gRNA
tggcctcccacgagaagaggagg

SEQ ID NO: 8075 - DNA, 23 bp, Artificial Sequence
  HLA-A targeting gRNA
tggcctcccacgaggaagggagg

SEQ ID NO: 8076 - DNA, 23 bp, Artificial Sequence
  HLA-A targeting gRNA
tggcctcccacgaggaggggagg

SEQ ID NO: 8077 - DNA, 23 bp, Artificial Sequence
  HLA-A targeting gRNA
tggcctggtctccacaagctcgg

SEQ ID NO: 8078 - DNA, 23 bp, Artificial Sequence
  HLA-A targeting gRNA
tggcctggtctccacaagctggg

SEQ ID NO: 8079 - DNA, 23 bp, Artificial Sequence
  HLA-A targeting gRNA
tggccttccacgaggaggggagg

SEQ ID NO: 8080 - DNA, 23 bp, Artificial Sequence
  HLA-A targeting gRNA
tggcgggtctcagcccctcctgg

SEQ ID NO: 8081 - DNA, 23 bp, Artificial Sequence
  HLA-A targeting gRNA
tggcgggtctggggcggggtggg

SEQ ID NO: 8082 - DNA, 23 bp, Artificial Sequence
  HLA-A targeting gRNA
tggcgggtctggggggggggggg

SEQ ID NO: 8083 - DNA, 23 bp, Artificial Sequence
  HLA-A targeting gRNA
tggcgggtctgggggtgggtggg

SEQ ID NO: 8084 - DNA, 23 bp, Artificial Sequence
  HLA-A targeting gRNA
tggcgtctctgaggaaatggagg

SEQ ID NO: 8085 - DNA, 23 bp, Artificial Sequence
  HLA-A targeting gRNA
tggctactacaaccagagcgagg

SEQ ID NO: 8086 - DNA, 23 bp, Artificial Sequence
  HLA-A targeting gRNA
tggctcccatctcagggtgaggg

SEQ ID NO: 8087 - DNA, 23 bp, Artificial Sequence
  HLA-A targeting gRNA
tggctgttgtgatgtgtaggagg

SEQ ID NO: 8088 - DNA, 23 bp, Artificial Sequence
  HLA-A targeting gRNA
tggctgttgttatgtgtaggagg

SEQ ID NO: 8089 - DNA, 23 bp, Artificial Sequence
  HLA-A targeting gRNA
tgggaaaagaggagaaggtgagg

SEQ ID NO: 8090 - DNA, 23 bp, Artificial Sequence
  HLA-A targeting gRNA
tgggaaaggaagggaagatgagg

SEQ ID NO: 8091 - DNA, 23 bp, Artificial Sequence
  HLA-A targeting gRNA
tgggaaaggaggagaaggtgagg

SEQ ID NO: 8092 - DNA, 23 bp, Artificial Sequence
  HLA-A targeting gRNA
tgggaaaggaggggaagacgagg

SEQ ID NO: 8093 - DNA, 23 bp, Artificial Sequence
  HLA-A targeting gRNA
tgggaaaggaggggaagatgagg

SEQ ID NO: 8094 - DNA, 23 bp, Artificial Sequence
  HLA-A targeting gRNA
tgggaaaggaggggaaggtgagg

SEQ ID NO: 8095 - DNA, 23 bp, Artificial Sequence
  HLA-A targeting gRNA
tgggaacctgggggcgaggaggg

SEQ ID NO: 8096 - DNA, 23 bp, Artificial Sequence
  HLA-A targeting gRNA
tgggaagaaaatgccctatgagg

SEQ ID NO: 8097 - DNA, 23 bp, Artificial Sequence
  HLA-A targeting gRNA
tgggaagaaaatgccctgtgagg

SEQ ID NO: 8098 - DNA, 23 bp, Artificial Sequence
  HLA-A targeting gRNA
tgggaagaaaatgtcctgtgagg

SEQ ID NO: 8099 - DNA, 23 bp, Artificial Sequence
  HLA-A targeting gRNA
tgggaagacggctccgggaaagg

SEQ ID NO: 8100 - DNA, 23 bp, Artificial Sequence
  HLA-A targeting gRNA
tgggaagacggctctgggaaagg

SEQ ID NO: 8101 - DNA, 23 bp, Artificial Sequence
  HLA-A targeting gRNA
tgggaagagtcagaaaattcagg

SEQ ID NO: 8102 - DNA, 23 bp, Artificial Sequence
  HLA-A targeting gRNA
tgggaagatggccctgggaaagg

SEQ ID NO: 8103 - DNA, 23 bp, Artificial Sequence
  HLA-A targeting gRNA
tgggaagatggctctgggaaagg

SEQ ID NO: 8104 - DNA, 23 bp, Artificial Sequence
  HLA-A targeting gRNA
tgggaagcaaatgtcctgtgagg

SEQ ID NO: 8105 - DNA, 23 bp, Artificial Sequence
  HLA-A targeting gRNA
tgggaagcagcatccacacaggg

SEQ ID NO: 8106 - DNA, 23 bp, Artificial Sequence
  HLA-A targeting gRNA
tgggaagcagcatcctcacaggg

SEQ ID NO: 8107 - DNA, 23 bp, Artificial Sequence
  HLA-A targeting gRNA
tgggaagcagcatgcacacaggg

SEQ ID NO: 8108 - DNA, 23 bp, Artificial Sequence
  HLA-A targeting gRNA
tgggagaagaagtgaaactcagg

SEQ ID NO: 8109 - DNA, 23 bp, Artificial Sequence
  HLA-A targeting gRNA
tgggagactgggggcgaggaggg

SEQ ID NO: 8110 - DNA, 23 bp, Artificial Sequence
  HLA-A targeting gRNA
tgggagactgggggtgaggaggg

SEQ ID NO: 8111 - DNA, 23 bp, Artificial Sequence
  HLA-A targeting gRNA
tgggagcctgggagcgaggaggg

SEQ ID NO: 8112 - DNA, 23 bp, Artificial Sequence
  HLA-A targeting gRNA
tgggagcctggggcaaggagggg

SEQ ID NO: 8113 - DNA, 23 bp, Artificial Sequence
  HLA-A targeting gRNA
tgggagcctgggggagaggaggg

SEQ ID NO: 8114 - DNA, 23 bp, Artificial Sequence
  HLA-A targeting gRNA
tgggagcctgggggccaggaggg

SEQ ID NO: 8115 - DNA, 23 bp, Artificial Sequence
  HLA-A targeting gRNA
tgggagcctgggggcgaggaggg

SEQ ID NO: 8116 - DNA, 23 bp, Artificial Sequence
  HLA-A targeting gRNA
tgggagcctgggggtgaggaggg

SEQ ID NO: 8117 - DNA, 23 bp, Artificial Sequence
  HLA-A targeting gRNA
tgggaggctgggggcgaggaggg

SEQ ID NO: 8118 - DNA, 23 bp, Artificial Sequence
  HLA-A targeting gRNA
tgggagggaaacggcctctgcgg

SEQ ID NO: 8119 - DNA, 23 bp, Artificial Sequence
  HLA-A targeting gRNA
tgggagggaaacggcctctgggg

SEQ ID NO: 8120 - DNA, 23 bp, Artificial Sequence
  HLA-A targeting gRNA
tgggagggaagcggcctctatgg

SEQ ID NO: 8121 - DNA, 23 bp, Artificial Sequence
  HLA-A targeting gRNA
tgggagggaagcggcctctgcgg

SEQ ID NO: 8122 - DNA, 23 bp, Artificial Sequence
  HLA-A targeting gRNA
tgggagggaatcggcctctgcgg

SEQ ID NO: 8123 - DNA, 23 bp, Artificial Sequence
  HLA-A targeting gRNA
tgggataatctcctattcattgg

SEQ ID NO: 8124 - DNA, 23 bp, Artificial Sequence
  HLA-A targeting gRNA
tgggataatctcctattctttgg

SEQ ID NO: 8125 - DNA, 23 bp, Artificial Sequence
  HLA-A targeting gRNA
tgggatgcagcatccacacaggg

SEQ ID NO: 8126 - DNA, 23 bp, Artificial Sequence
  HLA-A targeting gRNA
tgggatggcccacgtgtggatgg

SEQ ID NO: 8127 - DNA, 23 bp, Artificial Sequence
  HLA-A targeting gRNA
tgggatggcccaggtgtggatgg

SEQ ID NO: 8128 - DNA, 23 bp, Artificial Sequence
  HLA-A targeting gRNA
tgggatggcccatgtgtggatgg

SEQ ID NO: 8129 - DNA, 23 bp, Artificial Sequence
  HLA-A targeting gRNA
tgggcaggacacctggggtgggg

SEQ ID NO: 8130 - DNA, 23 bp, Artificial Sequence
  HLA-A targeting gRNA
tgggccctgggcttctaccctgg

SEQ ID NO: 8131 - DNA, 23 bp, Artificial Sequence
  HLA-A targeting gRNA
tgggccggtgagtgcgggatcgg

SEQ ID NO: 8132 - DNA, 23 bp, Artificial Sequence
  HLA-A targeting gRNA
tgggccggtgagtgcggggtcgg

SEQ ID NO: 8133 - DNA, 23 bp, Artificial Sequence
  HLA-A targeting gRNA
tgggccggtgagtgcggggttgg

SEQ ID NO: 8134 - DNA, 23 bp, Artificial Sequence
  HLA-A targeting gRNA
tgggccggtgagtgcgggtcggg

SEQ ID NO: 8135 - DNA, 23 bp, Artificial Sequence
  HLA-A targeting gRNA
tgggcctgtgagtgcgaggttgg

SEQ ID NO: 8136 - DNA, 23 bp, Artificial Sequence
  HLA-A targeting gRNA
tgggcctgtgagtgcggggttgg

SEQ ID NO: 8137 - DNA, 23 bp, Artificial Sequence
  HLA-A targeting gRNA
tgggcgacccgggccgtccgtgg

SEQ ID NO: 8138 - DNA, 23 bp, Artificial Sequence
  HLA-A targeting gRNA
tgggcggattccgcagcctcggg

SEQ ID NO: 8139 - DNA, 23 bp, Artificial Sequence
  HLA-A targeting gRNA
tgggcgggggggcggggaggggg

SEQ ID NO: 8140 - DNA, 23 bp, Artificial Sequence
  HLA-A targeting gRNA
tgggcggggggggcggggagggg

SEQ ID NO: 8141 - DNA, 23 bp, Artificial Sequence
  HLA-A targeting gRNA
tgggcggggggggggtggggtgg

SEQ ID NO: 8142 - DNA, 23 bp, Artificial Sequence
  HLA-A targeting gRNA
tgggcgggggggggtggggtggg

SEQ ID NO: 8143 - DNA, 23 bp, Artificial Sequence
  HLA-A targeting gRNA
tgggcggggggggtggggtgggg

SEQ ID NO: 8144 - DNA, 23 bp, Artificial Sequence
  HLA-A targeting gRNA
tgggcgggtcccgcggcctcagg

SEQ ID NO: 8145 - DNA, 23 bp, Artificial Sequence
  HLA-A targeting gRNA
tgggcgggtcccgcggcctcggg

SEQ ID NO: 8146 - DNA, 23 bp, Artificial Sequence
  HLA-A targeting gRNA
tgggcgggttccgcagcctcggg

SEQ ID NO: 8147 - DNA, 23 bp, Artificial Sequence
  HLA-A targeting gRNA
tgggctgggaagatggccctggg

SEQ ID NO: 8148 - DNA, 23 bp, Artificial Sequence
  HLA-A targeting gRNA
tgggctggtgagtgcggggtcgg

SEQ ID NO: 8149 - DNA, 23 bp, Artificial Sequence
  HLA-A targeting gRNA
tggggagctgaagtggtcggggg

SEQ ID NO: 8150 - DNA, 23 bp, Artificial Sequence
  HLA-A targeting gRNA
tggggagctgaagtggtctgggg

SEQ ID NO: 8151 - DNA, 23 bp, Artificial Sequence
  HLA-A targeting gRNA
tggggcagagggaaaaggcctgg

SEQ ID NO: 8152 - DNA, 23 bp, Artificial Sequence
  HLA-A targeting gRNA
tggggcagaggggaaaggcctgg

SEQ ID NO: 8153 - DNA, 23 bp, Artificial Sequence
  HLA-A targeting gRNA
tggggcagtggggaaaggcctgg

SEQ ID NO: 8154 - DNA, 23 bp, Artificial Sequence
  HLA-A targeting gRNA
tggggcggggctcgcgggacggg

SEQ ID NO: 8155 - DNA, 23 bp, Artificial Sequence
  HLA-A targeting gRNA
tggggcggggctcgggggaccgg

SEQ ID NO: 8156 - DNA, 23 bp, Artificial Sequence
  HLA-A targeting gRNA
tggggcggggctcgggggacggg

SEQ ID NO: 8157 - DNA, 23 bp, Artificial Sequence
  HLA-A targeting gRNA
tggggcggggtggggcagagggg

SEQ ID NO: 8158 - DNA, 23 bp, Artificial Sequence
  HLA-A targeting gRNA
tggggcggggttcgggggacggg

SEQ ID NO: 8159 - DNA, 23 bp, Artificial Sequence
  HLA-A targeting gRNA
tggggcttgaaacccccagtggg

SEQ ID NO: 8160 - DNA, 23 bp, Artificial Sequence
  HLA-A targeting gRNA
tggggcttgaaactcccagtggg

SEQ ID NO: 8161 - DNA, 23 bp, Artificial Sequence
  HLA-A targeting gRNA
tggggggggggggggcagagggg

SEQ ID NO: 8162 - DNA, 23 bp, Artificial Sequence
  HLA-A targeting gRNA
tgggggtggcgggtctggggcgg

SEQ ID NO: 8163 - DNA, 23 bp, Artificial Sequence
  HLA-A targeting gRNA
tgggggtgggtggggcagagggg

SEQ ID NO: 8164 - DNA, 23 bp, Artificial Sequence
  HLA-A targeting gRNA
tgggggtgggtggggcagtgggg

SEQ ID NO: 8165 - DNA, 23 bp, Artificial Sequence
  HLA-A targeting gRNA
tggggtaaggaggggaatggggg

SEQ ID NO: 8166 - DNA, 23 bp, Artificial Sequence
  HLA-A targeting gRNA
tggggtaaggagggggatgaggg

SEQ ID NO: 8167 - DNA, 23 bp, Artificial Sequence
  HLA-A targeting gRNA
tggggtctagagtgggcaggggg

SEQ ID NO: 8168 - DNA, 23 bp, Artificial Sequence
  HLA-A targeting gRNA
tggggtctagagtgggcgggggg

SEQ ID NO: 8169 - DNA, 23 bp, Artificial Sequence
  HLA-A targeting gRNA
tggggtggcaggtctgggggtgg

SEQ ID NO: 8170 - DNA, 23 bp, Artificial Sequence
  HLA-A targeting gRNA
tggggtggcgggtctgggggggg

SEQ ID NO: 8171 - DNA, 23 bp, Artificial Sequence
  HLA-A targeting gRNA
tggggtggcgggtctgggggtgg

SEQ ID NO: 8172 - DNA, 23 bp, Artificial Sequence
  HLA-A targeting gRNA
tggggtggggagggggcagaggg

SEQ ID NO: 8173 - DNA, 23 bp, Artificial Sequence
  HLA-A targeting gRNA
tggggtggggcagagggaaaagg

SEQ ID NO: 8174 - DNA, 23 bp, Artificial Sequence
  HLA-A targeting gRNA
tgggtcacatgtgtctttggggg

SEQ ID NO: 8175 - DNA, 23 bp, Artificial Sequence
  HLA-A targeting gRNA
tgggtcacgtgtgtctttgcggg

SEQ ID NO: 8176 - DNA, 23 bp, Artificial Sequence
  HLA-A targeting gRNA
tgggtcacgtgtgtctttggggg

SEQ ID NO: 8177 - DNA, 23 bp, Artificial Sequence
  HLA-A targeting gRNA
tgggtcagggctgaggcttgggg

SEQ ID NO: 8178 - DNA, 23 bp, Artificial Sequence
  HLA-A targeting gRNA
tgggtctgcagtcatagttctgg

SEQ ID NO: 8179 - DNA, 23 bp, Artificial Sequence
  HLA-A targeting gRNA
tgggtctgcagtcgtagttctgg

SEQ ID NO: 8180 - DNA, 23 bp, Artificial Sequence
  HLA-A targeting gRNA
tgggtctgtagtcatacttctgg

SEQ ID NO: 8181 - DNA, 23 bp, Artificial Sequence
  HLA-A targeting gRNA
tgggtgggggtggcgggtctggg

SEQ ID NO: 8182 - DNA, 23 bp, Artificial Sequence
  HLA-A targeting gRNA
tgggtggggtggcaggtctgggg

SEQ ID NO: 8183 - DNA, 23 bp, Artificial Sequence
  HLA-A targeting gRNA
tgggtggggtggcgggtctgggg

SEQ ID NO: 8184 - DNA, 23 bp, Artificial Sequence
  HLA-A targeting gRNA
tgggttttcttgtcccactgggg

SEQ ID NO: 8185 - DNA, 23 bp, Artificial Sequence
  HLA-A targeting gRNA
tgggttttgttgtcccactgggg

SEQ ID NO: 8186 - DNA, 23 bp, Artificial Sequence
  HLA-A targeting gRNA
tggtcacatgggtggtcctaggg

SEQ ID NO: 8187 - DNA, 23 bp, Artificial Sequence
  HLA-A targeting gRNA
tggtcaccgctaagatgtgtagg

SEQ ID NO: 8188 - DNA, 23 bp, Artificial Sequence
  HLA-A targeting gRNA
tggtcaccgctatgatgtgtagg

SEQ ID NO: 8189 - DNA, 23 bp, Artificial Sequence
  HLA-A targeting gRNA
tggtcatacccgcggaggagggg

SEQ ID NO: 8190 - DNA, 23 bp, Artificial Sequence
  HLA-A targeting gRNA
tggtcgctactgtgatgtgtagg

SEQ ID NO: 8191 - DNA, 23 bp, Artificial Sequence
  HLA-A targeting gRNA
tggtcgctgctgtgatacatagg

SEQ ID NO: 8192 - DNA, 23 bp, Artificial Sequence
  HLA-A targeting gRNA
tggtcgctgctgtgatgtgtagg

SEQ ID NO: 8193 - DNA, 23 bp, Artificial Sequence
  HLA-A targeting gRNA
tggtcgctgctgtggtgtgtagg

SEQ ID NO: 8194 - DNA, 23 bp, Artificial Sequence
  HLA-A targeting gRNA
tggtcggggcggggcggggcggg

SEQ ID NO: 8195 - DNA, 23 bp, Artificial Sequence
  HLA-A targeting gRNA
tggtctggtctccacaagctcgg

SEQ ID NO: 8196 - DNA, 23 bp, Artificial Sequence
  HLA-A targeting gRNA
tggtgagtgcggggtcggcaggg

SEQ ID NO: 8197 - DNA, 23 bp, Artificial Sequence
  HLA-A targeting gRNA
tggtgagtgcggggtcgggaggg

SEQ ID NO: 8198 - DNA, 23 bp, Artificial Sequence
  HLA-A targeting gRNA
tggtgcttccagtaacaaggcgg

SEQ ID NO: 8199 - DNA, 23 bp, Artificial Sequence
  HLA-A targeting gRNA
tggtgcttccagtaacgaggtgg

SEQ ID NO: 8200 - DNA, 23 bp, Artificial Sequence
  HLA-A targeting gRNA
tggtggctgttgtgatgtgtagg

SEQ ID NO: 8201 - DNA, 23 bp, Artificial Sequence
  HLA-A targeting gRNA
tggtggctgttgttatgtgtagg

SEQ ID NO: 8202 - DNA, 23 bp, Artificial Sequence
  HLA-A targeting gRNA
tggtgggcacgtgcgtggagtgg

SEQ ID NO: 8203 - DNA, 23 bp, Artificial Sequence
  HLA-A targeting gRNA
tggtgggggtgggagtgtgaagg

SEQ ID NO: 8204 - DNA, 23 bp, Artificial Sequence
  HLA-A targeting gRNA
tggtgggggtgggagtgtggagg

SEQ ID NO: 8205 - DNA, 23 bp, Artificial Sequence
  HLA-A targeting gRNA
tggtgggtcacatgtgtctttgg

SEQ ID NO: 8206 - DNA, 23 bp, Artificial Sequence
  HLA-A targeting gRNA
tggtgggtcacgtgtgtctttgg

SEQ ID NO: 8207 - DNA, 23 bp, Artificial Sequence
  HLA-A targeting gRNA
tggttcccaaggctgctgcaggg

SEQ ID NO: 8208 - DNA, 23 bp, Artificial Sequence
  HLA-A targeting gRNA
tggttgctactgtgatgtgtagg

SEQ ID NO: 8209 - DNA, 23 bp, Artificial Sequence
  HLA-A targeting gRNA
tgtagaaatacctcaaggagtgg

SEQ ID NO: 8210 - DNA, 23 bp, Artificial Sequence
  HLA-A targeting gRNA
tgtagaaatacctcatgaagtgg

SEQ ID NO: 8211 - DNA, 23 bp, Artificial Sequence
  HLA-A targeting gRNA
tgtagaaatacctcatggagagg

SEQ ID NO: 8212 - DNA, 23 bp, Artificial Sequence
  HLA-A targeting gRNA
tgtagaaatacttcatggagtgg

SEQ ID NO: 8213 - DNA, 23 bp, Artificial Sequence
  HLA-A targeting gRNA
tgtagccgcgcaggttccgcagg

SEQ ID NO: 8214 - DNA, 23 bp, Artificial Sequence
  HLA-A targeting gRNA
tgtaggacagctgcctgtgtggg

SEQ ID NO: 8215 - DNA, 23 bp, Artificial Sequence
  HLA-A targeting gRNA
tgtaggaggaagagctcaggtgg

SEQ ID NO: 8216 - DNA, 23 bp, Artificial Sequence
  HLA-A targeting gRNA
tgtcacaaaagagtaagtgctgg

SEQ ID NO: 8217 - DNA, 23 bp, Artificial Sequence
  HLA-A targeting gRNA
tgtcccggacggggctctcaggg

SEQ ID NO: 8218 - DNA, 23 bp, Artificial Sequence
  HLA-A targeting gRNA
tgtcccgtccattctcaggctgg

SEQ ID NO: 8219 - DNA, 23 bp, Artificial Sequence
  HLA-A targeting gRNA
tgtcctgcccattctcaggctgg

SEQ ID NO: 8220 - DNA, 23 bp, Artificial Sequence
  HLA-A targeting gRNA
tgtcctgtccattctcaggatgg

SEQ ID NO: 8221 - DNA, 23 bp, Artificial Sequence
  HLA-A targeting gRNA
tgtcctgtccattctcaggctgg

SEQ ID NO: 8222 - DNA, 23 bp, Artificial Sequence
  HLA-A targeting gRNA
tgtcctgtccgttctcaggatgg

SEQ ID NO: 8223 - DNA, 23 bp, Artificial Sequence
  HLA-A targeting gRNA
tgtcctgtgagggcactgggagg

SEQ ID NO: 8224 - DNA, 23 bp, Artificial Sequence
  HLA-A targeting gRNA
tgtcctgtgaggggactgggagg

SEQ ID NO: 8225 - DNA, 23 bp, Artificial Sequence
  HLA-A targeting gRNA
tgtcgaaatacctcatggagtgg

SEQ ID NO: 8226 - DNA, 23 bp, Artificial Sequence
  HLA-A targeting gRNA
tgtgaagcacatgacaacgaagg

SEQ ID NO: 8227 - DNA, 23 bp, Artificial Sequence
  HLA-A targeting gRNA
tgtgaagcacatgacaatgaagg

SEQ ID NO: 8228 - DNA, 23 bp, Artificial Sequence
  HLA-A targeting gRNA
tgtgacacatgtgacaatgaagg

SEQ ID NO: 8229 - DNA, 23 bp, Artificial Sequence
  HLA-A targeting gRNA
tgtgagacccggcctcgctctgg

SEQ ID NO: 8230 - DNA, 23 bp, Artificial Sequence
  HLA-A targeting gRNA
tgtgagtccgggtgggtgactgg

SEQ ID NO: 8231 - DNA, 23 bp, Artificial Sequence
  HLA-A targeting gRNA
tgtgcagcacgaggggctgcagg

SEQ ID NO: 8232 - DNA, 23 bp, Artificial Sequence
  HLA-A targeting gRNA
tgtgcagcacgaggggctgccgg

SEQ ID NO: 8233 - DNA, 23 bp, Artificial Sequence
  HLA-A targeting gRNA
tgtgcagcacgaggggctgctgg

SEQ ID NO: 8234 - DNA, 23 bp, Artificial Sequence
  HLA-A targeting gRNA
tgtgcagcacgaggggctgtcgg

SEQ ID NO: 8235 - DNA, 23 bp, Artificial Sequence
  HLA-A targeting gRNA
tgtgcccccttccccaccccagg

SEQ ID NO: 8236 - DNA, 23 bp, Artificial Sequence
  HLA-A targeting gRNA
tgtgcccccttccctaccccagg

SEQ ID NO: 8237 - DNA, 23 bp, Artificial Sequence
  HLA-A targeting gRNA
tgtgccgccttccccaccccagg

SEQ ID NO: 8238 - DNA, 23 bp, Artificial Sequence
  HLA-A targeting gRNA
tgtggaaatacctcatggagtgg

SEQ ID NO: 8239 - DNA, 23 bp, Artificial Sequence
  HLA-A targeting gRNA
tgtgggacaagaggaattatggg

SEQ ID NO: 8240 - DNA, 23 bp, Artificial Sequence
  HLA-A targeting gRNA
tgtgtcccggcccggccgcgggg

SEQ ID NO: 8241 - DNA, 23 bp, Artificial Sequence
  HLA-A targeting gRNA
tgtgtctttgcggggtctgatgg

SEQ ID NO: 8242 - DNA, 23 bp, Artificial Sequence
  HLA-A targeting gRNA
tgtgtctttgggcgttctgacgg

SEQ ID NO: 8243 - DNA, 23 bp, Artificial Sequence
  HLA-A targeting gRNA
tgtgtctttggggggtctgatgg

SEQ ID NO: 8244 - DNA, 23 bp, Artificial Sequence
  HLA-A targeting gRNA
tgtgtctttgggggttctgacgg

SEQ ID NO: 8245 - DNA, 23 bp, Artificial Sequence
  HLA-A targeting gRNA
tgtgtctttgggtgttctgacgg

SEQ ID NO: 8246 - DNA, 23 bp, Artificial Sequence
  HLA-A targeting gRNA
tgtgtctttgggtgttctgatgg

SEQ ID NO: 8247 - DNA, 23 bp, Artificial Sequence
  HLA-A targeting gRNA
tgtgtttcctgatcctgccctgg

SEQ ID NO: 8248 - DNA, 23 bp, Artificial Sequence
  HLA-A targeting gRNA
tgttcagcacgaggggctgccgg

SEQ ID NO: 8249 - DNA, 23 bp, Artificial Sequence
  HLA-A targeting gRNA
ttaagtctgtgtgttggtcttgg

SEQ ID NO: 8250 - DNA, 23 bp, Artificial Sequence
  HLA-A targeting gRNA
ttaattgtcctagacagcagagg

SEQ ID NO: 8251 - DNA, 23 bp, Artificial Sequence
  HLA-A targeting gRNA
ttaattgtcctagagagaagagg

SEQ ID NO: 8252 - DNA, 23 bp, Artificial Sequence
  HLA-A targeting gRNA
ttaattgtcctagagagcagagg

SEQ ID NO: 8253 - DNA, 23 bp, Artificial Sequence
  HLA-A targeting gRNA
ttaattgtctagagagaagaggg

SEQ ID NO: 8254 - DNA, 23 bp, Artificial Sequence
  HLA-A targeting gRNA
ttaccccagctcagggtgagggg

SEQ ID NO: 8255 - DNA, 23 bp, Artificial Sequence
  HLA-A targeting gRNA
ttactccatctcagggtgagggg

SEQ ID NO: 8256 - DNA, 23 bp, Artificial Sequence
  HLA-A targeting gRNA
ttactccatctcagggtgcaggg

SEQ ID NO: 8257 - DNA, 23 bp, Artificial Sequence
  HLA-A targeting gRNA
ttagaggaacctcctagtcttgg

SEQ ID NO: 8258 - DNA, 23 bp, Artificial Sequence
  HLA-A targeting gRNA
ttagaggaacctcctcgtcttgg

SEQ ID NO: 8259 - DNA, 23 bp, Artificial Sequence
  HLA-A targeting gRNA
ttagatcacccagcgcaagtggg

SEQ ID NO: 8260 - DNA, 23 bp, Artificial Sequence
  HLA-A targeting gRNA
ttaggggaacctcctagtcttgg

SEQ ID NO: 8261 - DNA, 23 bp, Artificial Sequence
  HLA-A targeting gRNA
ttatcccaggtgcctgcgtccgg

SEQ ID NO: 8262 - DNA, 23 bp, Artificial Sequence
  HLA-A targeting gRNA
ttcacatccgtgtcccggcctgg

SEQ ID NO: 8263 - DNA, 23 bp, Artificial Sequence
  HLA-A targeting gRNA
ttcacatccgtgtcctggcccgg

SEQ ID NO: 8264 - DNA, 23 bp, Artificial Sequence
  HLA-A targeting gRNA
ttcagcccctcctcgcccccagg

SEQ ID NO: 8265 - DNA, 23 bp, Artificial Sequence
  HLA-A targeting gRNA
ttcaggtagggaaggggtgaggg

SEQ ID NO: 8266 - DNA, 23 bp, Artificial Sequence
  HLA-A targeting gRNA
ttcatggagtgggagcctggggg

SEQ ID NO: 8267 - DNA, 23 bp, Artificial Sequence
  HLA-A targeting gRNA
ttcatggagtgggaggctggggg

SEQ ID NO: 8268 - DNA, 23 bp, Artificial Sequence
  HLA-A targeting gRNA
ttccagcattcatgagtcagggg

SEQ ID NO: 8269 - DNA, 23 bp, Artificial Sequence
  HLA-A targeting gRNA
ttccagcattcatgagtcggggg

SEQ ID NO: 8270 - DNA, 23 bp, Artificial Sequence
  HLA-A targeting gRNA
ttccagcattcgtgagtcagggg

SEQ ID NO: 8271 - DNA, 23 bp, Artificial Sequence
  HLA-A targeting gRNA
ttcccacaggtggaaaaggaggg

SEQ ID NO: 8272 - DNA, 23 bp, Artificial Sequence
  HLA-A targeting gRNA
ttcccactcccattgggtattgg

SEQ ID NO: 8273 - DNA, 23 bp, Artificial Sequence
  HLA-A targeting gRNA
ttcccactcccattgggtgtcgg

SEQ ID NO: 8274 - DNA, 23 bp, Artificial Sequence
  HLA-A targeting gRNA
ttcccccgactcatgaatgctgg

SEQ ID NO: 8275 - DNA, 23 bp, Artificial Sequence
  HLA-A targeting gRNA
ttcccctgactcacgaatgctgg

SEQ ID NO: 8276 - DNA, 23 bp, Artificial Sequence
  HLA-A targeting gRNA
ttcccctgactcatgaatgctgg

SEQ ID NO: 8277 - DNA, 23 bp, Artificial Sequence
  HLA-A targeting gRNA
ttcctcccagtcccctcacaggg

SEQ ID NO: 8278 - DNA, 23 bp, Artificial Sequence
  HLA-A targeting gRNA
ttcctcgtgggaggccatcccgg

SEQ ID NO: 8279 - DNA, 23 bp, Artificial Sequence
  HLA-A targeting gRNA
ttcctggaccgccgcggacacgg

SEQ ID NO: 8280 - DNA, 23 bp, Artificial Sequence
  HLA-A targeting gRNA
ttccttttgggtccaagacgagg

SEQ ID NO: 8281 - DNA, 23 bp, Artificial Sequence
  HLA-A targeting gRNA
ttccttttgggtccaagactagg

SEQ ID NO: 8282 - DNA, 23 bp, Artificial Sequence
  HLA-A targeting gRNA
ttccttttggttccaagacgagg

SEQ ID NO: 8283 - DNA, 23 bp, Artificial Sequence
  HLA-A targeting gRNA
ttcgaccactgcggcagctgtgg

SEQ ID NO: 8284 - DNA, 23 bp, Artificial Sequence
  HLA-A targeting gRNA
ttcggtaaggagggggatgaggg

SEQ ID NO: 8285 - DNA, 23 bp, Artificial Sequence
  HLA-A targeting gRNA
ttctagaagtcccaggtcccggg

SEQ ID NO: 8286 - DNA, 23 bp, Artificial Sequence
  HLA-A targeting gRNA
ttctcagctgctccgccacacgg

SEQ ID NO: 8287 - DNA, 23 bp, Artificial Sequence
  HLA-A targeting gRNA
ttctcagctgctccgcctcacgg

SEQ ID NO: 8288 - DNA, 23 bp, Artificial Sequence
  HLA-A targeting gRNA
ttctccacccacggcgcccgcgg

SEQ ID NO: 8289 - DNA, 23 bp, Artificial Sequence
  HLA-A targeting gRNA
ttctccgctgctccgcctcacgg

SEQ ID NO: 8290 - DNA, 23 bp, Artificial Sequence
  HLA-A targeting gRNA
ttctcgtgggaggccatccccgg

SEQ ID NO: 8291 - DNA, 23 bp, Artificial Sequence
  HLA-A targeting gRNA
ttctcgttggaggccatccccgg

SEQ ID NO: 8292 - DNA, 23 bp, Artificial Sequence
  HLA-A targeting gRNA
ttctggagggtgtgagaccctgg

SEQ ID NO: 8293 - DNA, 23 bp, Artificial Sequence
  HLA-A targeting gRNA
ttctgggagctgaagtggtcggg

SEQ ID NO: 8294 - DNA, 23 bp, Artificial Sequence
  HLA-A targeting gRNA
ttctggggagctgaagtggtcgg

SEQ ID NO: 8295 - DNA, 23 bp, Artificial Sequence
  HLA-A targeting gRNA
ttctggtagggaaggggtgaggg

SEQ ID NO: 8296 - DNA, 23 bp, Artificial Sequence
  HLA-A targeting gRNA
ttcttctcccaacctatgtcggg

SEQ ID NO: 8297 - DNA, 23 bp, Artificial Sequence
  HLA-A targeting gRNA
ttcttctcccaacctgcgacggg

SEQ ID NO: 8298 - DNA, 23 bp, Artificial Sequence
  HLA-A targeting gRNA
ttcttctcccaacctgcgtcggg

SEQ ID NO: 8299 - DNA, 23 bp, Artificial Sequence
  HLA-A targeting gRNA
ttcttctcccaacctgtgtcggg

SEQ ID NO: 8300 - DNA, 23 bp, Artificial Sequence
  HLA-A targeting gRNA
ttcttctcccaacttgtgtcggg

SEQ ID NO: 8301 - DNA, 23 bp, Artificial Sequence
  HLA-A targeting gRNA
ttcttcttccaacctgcgtcggg

SEQ ID NO: 8302 - DNA, 23 bp, Artificial Sequence
  HLA-A targeting gRNA
ttcttggggtctagagtgggcgg

SEQ ID NO: 8303 - DNA, 23 bp, Artificial Sequence
  HLA-A targeting gRNA
ttcttggggtctagagtgggtgg

SEQ ID NO: 8304 - DNA, 23 bp, Artificial Sequence
  HLA-A targeting gRNA
ttctttttgggtccaagactagg

SEQ ID NO: 8305 - DNA, 23 bp, Artificial Sequence
  HLA-A targeting gRNA
ttgaaaaggtgagattcttgggg

SEQ ID NO: 8306 - DNA, 23 bp, Artificial Sequence
  HLA-A targeting gRNA
ttgacccctgcagcagccttggg

SEQ ID NO: 8307 - DNA, 23 bp, Artificial Sequence
  HLA-A targeting gRNA
ttgagtccgggtgggtgcgtggg

SEQ ID NO: 8308 - DNA, 23 bp, Artificial Sequence
  HLA-A targeting gRNA
ttgcgtgtaagtgatggcggcgg

SEQ ID NO: 8309 - DNA, 23 bp, Artificial Sequence
  HLA-A targeting gRNA
ttgctactgtgatgtgtaggagg

SEQ ID NO: 8310 - DNA, 23 bp, Artificial Sequence
  HLA-A targeting gRNA
ttgctctatccacggcgcccggg

SEQ ID NO: 8311 - DNA, 23 bp, Artificial Sequence
  HLA-A targeting gRNA
ttgctctatccatggcgcccggg

SEQ ID NO: 8312 - DNA, 23 bp, Artificial Sequence
  HLA-A targeting gRNA
ttgcttcccacaggtggaaaagg

SEQ ID NO: 8313 - DNA, 23 bp, Artificial Sequence
  HLA-A targeting gRNA
ttggaaagttctagtctctgagg

SEQ ID NO: 8314 - DNA, 23 bp, Artificial Sequence
  HLA-A targeting gRNA
ttgggagaagtgaaactcagggg

SEQ ID NO: 8315 - DNA, 23 bp, Artificial Sequence
  HLA-A targeting gRNA
ttgggagggaaacggcctctggg

SEQ ID NO: 8316 - DNA, 23 bp, Artificial Sequence
  HLA-A targeting gRNA
ttggggtctagagtgggcagggg

SEQ ID NO: 8317 - DNA, 23 bp, Artificial Sequence
  HLA-A targeting gRNA
ttggggtctagagtgggcggggg

SEQ ID NO: 8318 - DNA, 23 bp, Artificial Sequence
  HLA-A targeting gRNA
ttggggtctagagtgggtggggg

SEQ ID NO: 8319 - DNA, 23 bp, Artificial Sequence
  HLA-A targeting gRNA
ttggtcggggcggggcggggcgg

SEQ ID NO: 8320 - DNA, 23 bp, Artificial Sequence
  HLA-A targeting gRNA
ttggtcttgaagatctgttccgg

SEQ ID NO: 8321 - DNA, 23 bp, Artificial Sequence
  HLA-A targeting gRNA
ttgtgtcgggtccttcttccagg

SEQ ID NO: 8322 - DNA, 23 bp, Artificial Sequence
  HLA-A targeting gRNA
ttgtgtcgggtccttcttccggg

SEQ ID NO: 8323 - DNA, 23 bp, Artificial Sequence
  HLA-A targeting gRNA
tttcagcattcatgagtcagggg

SEQ ID NO: 8324 - DNA, 23 bp, Artificial Sequence
  HLA-A targeting gRNA
tttcctcccctcctcgtggaagg

SEQ ID NO: 8325 - DNA, 23 bp, Artificial Sequence
  HLA-A targeting gRNA
tttcctcccctcctcgtgggagg

SEQ ID NO: 8326 - DNA, 23 bp, Artificial Sequence
  HLA-A targeting gRNA
tttcctcccttcctcgtgggagg

SEQ ID NO: 8327 - DNA, 23 bp, Artificial Sequence
  HLA-A targeting gRNA
tttcctcctcttctcgtgggagg

SEQ ID NO: 8328 - DNA, 23 bp, Artificial Sequence
  HLA-A targeting gRNA
tttcctcttcttctcgtgggagg

SEQ ID NO: 8329 - DNA, 23 bp, Artificial Sequence
  HLA-A targeting gRNA
tttcctcttcttctcgttggagg

SEQ ID NO: 8330 - DNA, 23 bp, Artificial Sequence
  HLA-A targeting gRNA
tttcttcccacaggtggaaaagg

SEQ ID NO: 8331 - DNA, 23 bp, Artificial Sequence
  HLA-A targeting gRNA
tttgaccactgcagcagctgtgg

SEQ ID NO: 8332 - DNA, 23 bp, Artificial Sequence
  HLA-A targeting gRNA
tttgaccactgcggcagctgtgg

SEQ ID NO: 8333 - DNA, 23 bp, Artificial Sequence
  HLA-A targeting gRNA
tttgaccacttcgaccactgcgg

SEQ ID NO: 8334 - DNA, 23 bp, Artificial Sequence
  HLA-A targeting gRNA
tttgaccactttgaccactgcgg

SEQ ID NO: 8335 - DNA, 23 bp, Artificial Sequence
  HLA-A targeting gRNA
tttgacccctgcagcagccttgg

SEQ ID NO: 8336 - DNA, 23 bp, Artificial Sequence
  HLA-A targeting gRNA
tttgagtccgggtgggtgcgtgg

SEQ ID NO: 8337 - DNA, 23 bp, Artificial Sequence
  HLA-A targeting gRNA
tttgcagaaagagatgccagagg

SEQ ID NO: 8338 - DNA, 23 bp, Artificial Sequence
  HLA-A targeting gRNA
tttgtagaaagagatgccagagg

SEQ ID NO: 8339 - DNA, 23 bp, Artificial Sequence
  HLA-A targeting gRNA
tttgtgacttcaagagcctctgg

SEQ ID NO: 8340 - DNA, 23 bp, Artificial Sequence
  HLA-A targeting gRNA
tttgtgacttcaagggcctctgg

SEQ ID NO: 8341 - DNA, 23 bp, Artificial Sequence
  HLA-A targeting gRNA
ttttcccgagtttcctctgaggg

SEQ ID NO: 8342 - DNA, 23 bp, Artificial Sequence
  HLA-A targeting gRNA
ttttcctgagtttcctctgaggg

SEQ ID NO: 8343 - DNA, 23 bp, Artificial Sequence
  HLA-A targeting gRNA
ttttcctgagtttcttctgaggg

SEQ ID NO: 8344 - DNA, 23 bp, Artificial Sequence
  HLA-A targeting gRNA
tttttgggtccaagactaggagg

SEQ ID NO: 8345 - DNA, 83 bp, Artificial Sequence
  Cas9 gRNA Scaffold
gttttagagctagaaatagcaagttaaaataaggctagtccgttatcaacttgaaaaagtggcaccgagtcggtgcttttttt

SEQ ID NO: 8346 - DNA, 3217 bp, Artificial Sequence
  HLA-A*02 gene sequence
atggccgtcatggcgccccgaaccctcgtcctgctactctcgggggctctggccctgacccagacctgggcgggtgagtgcggggtcgggagggaaacggcctctgtggggagaagcaacgggcccgcctggcgggggcgcaggacccgggaagccgcgccgggaggagggtcgggcgggtctcagccactcctcgtccccaggctctcactccatgaggtatttcttcacatccgtgtcccggcccggccgcggggagccccgcttcatcgcagtgggctacgtggacgacacgcagttcgtgcggttcgacagcgacgccgcgagccagaggatggagccgcgggcgccgtggatagagcaggagggtccggagtattgggacggggagacacggaaagtgaaggcccactcacagactcaccgagtggacctggggaccctgcgcggctactacaaccagagcgaggccggtgagtgaccccggcccggggcgcaggtcacgacctctcatcccccacggacgggccaggtcgcccacagtctccgggtccgagatccgccccgaagccgcgggaccccgagacccttgccccgggagaggcccaggcgcctttacccggtttcattttcagtttaggccaaaaatccccccaggttggtcggggcggggcggggctcgggggaccgggctgaccgcggggtccgggccaggttctcacaccgtccagaggatgtatggctgcgacgtggggtcggactggcgcttcctccgcgggtaccaccagtacgcctacgacggcaaggattacatcgccctgaaagaggacctgcgctctttgaccgcggcggacatggcagctcagaccaccaagcacaagtgggaggcggcccatgtggcggagcagttgagagcctacctggagggcacgtgcgtggagtggctccgcagatacctggagaacgggaaggagacgctgcagcgcacgggtaccaggggccacggggcgcctccctgatcgcctgtagatctcccgggctggcctcccacaaggaggggagacaattgggaccaacactagaatatcgccctccctctggtcctgagggagaggaatcctcctgggtttccagatcctgtaccagagagtgactctgaggttccgccctgctctctgacacaattaagggataaaatctctgaaggaatgacgggaagacgatccctcgaatactgatgagtggttccctttgacacacacaggcagcagccttgggcccgtgacttttcctctcaggccttgttctctgcttcacactcaatgtgtgtgggggtctgagtccagcacttctgagtccttcagcctccactcaggtcaggaccagaagtcgctgttccctcttcagggactagaattttccacggaataggagattatcccaggtgcctgtgtccaggctggtgtctgggttctgtgctcccttccccatcccaggtgtcctgtccattctcaagatagccacatgtgtgctggaggagtgtcccatgacagatgcaaaatgcctgaatgatctgactcttcctgacagacgcccccaaaacgcatatgactcaccacgctgtctctgaccatgaagccaccctgaggtgctgggccctgagcttctaccctgcggagatcacactgacctggcagcgggatggggaggaccagacccaggacacggagctcgtggagaccaggcctgcaggggatggaaccttccagaagtgggcggctgtggtggtgccttctggacaggagcagagatacacctgccatgtgcagcatgagggtttgcccaagcccctcaccctgagatggggtaaggagggagacgggggtgtcatgtcttttagggaaagcaggagcctctctgacctttagcagggtcagggcccctcaccttcccctcttttcccagagccgtcttcccagcccaccatccccatcgtgggcatcattgctggcctggttctctttggagctgtgatcactggagctgtggtcgctgctgtgatgtggaggaggaagagctcaggtggggaaggggtgaagggtgggtctgagatttcttgtctcactgagggttccaagacccaggtagaagtgtgccctgcctcgttactgggaagcaccacccacaattatgggcctacccagcctgggccctgtgtgccagcacttactcttttgtaaagcacctgttaaaatgaaggacagatttatcaccttgattacagcggtgatgggacctgatcccagcagtcacaagtcacaggggaaggtccctgaggaccttcaggagggcggttggtccaggacccacacctgctttcttcatgtttcctgatcccgccctgggtctgcagtcacacatttctggaaacttctctgaggtccaagacttggaggttcctctaggaccttaaggccctgactcctttctggtatctcacaggacattttcttcccacagatagaaaaggagggagctactctcaggctgcaagtaagtatgaaggaggctgatgcctgaggtccttgggatattgtgtttgggagcccatgggggagctcacccaccccacaattcctcctctagccacatcttctgtgggatctgaccaggttctgtttttgttctaccccaggcagtgacagtgcccagggctctgatgtgtctctcacagcttgtaaaggtgagagcctggagggcctgatgtgtgttgggtgttgggcggaacagtggacacagctgtgctatggggtttctttccattggatgtattgagcatgcgatgggctgtttaaagtgtgacccctcactgtgacagatacgaatttgttcatgaatatttttttctatagtgtgagacagctgccttgtgtgggactgagaggcaagagttgttcctgcccttccctttgtgacttgaagaaccctgactttgtttctgcaaaggcacctgcatgtgtctgtgttcgtgtaggcataatgtgaggaggtggggagaccaccccacccccatgtccaccatgaccctcttcccacgctgacctgtgctccctccccaatcatctttcctgttccagagaggtggggctgaggtgtctccatctctgtctcaacttcatggtgcactgagctgtaacttcttccttccctattaaaa

SEQ ID NO: 8347 - DNA, 2917 bp, Artificial Sequence
  HLA-A*02:01 gene sequence
atggccgtcatggcgccccgaaccctcgtcctgctactctcgggggctctggccctgacccacacctgggcgggtgagtgcggggtcgggagggaaacggcctctgtggggagaagcaacgggcccgcctggcgggggcgcaggacccgggaagccgcgccgggaggagggtcgggcgggtctcagccactcctcgtccccaggctctcactccatgaggtatttcttcacatccgtgtcccggcccggccgcggggagccccgcttcatcgcagtgggctacgtggacgacacgcagttcgtgcggttcgacagcgacgccgcgagccagaggatggagccgcgggcgccgtggatagagcaggagggtccggagtattgggacggggagacacggaaagtgaaggcccactcacagactcaccgagtggacctggggaccctgcgcggctactacaaccagagcgaggccggtgagtgaccccggcccggggcgcaggtcacgacctctcatcccccacggacgggccaggtcgcccacagtctccgggtccgagatccgccccgaagccgcgggaccccgagacccttgccccgggagaggcccaggcgcctttacccggtttcattttcagtttaggccaaaaatccccccaggttggtcggggcggggcggggctcgggggaccgggctgaccgcggggtccgggccaggttctcacaccgtccagaggatgtatggctgcgacgtggggtcggactggcgcttcctccgcgggtaccaccagtacgcctacgacggcaaggattacatcgccctgaaagaggacctgcgctcttggaccgcggcggacatggcagctcagaccaccaagcacaagtgggaggcggcccatgtggcggagcagttgagagcctacctggagggcacgtgcgtggagtggctccgcagatacctggagaacgggaaggagacgctgcagcgcacgggtaccaggggccacggggcgcctccctgatcgcctgtagatctcccgggctggcctcccacaaggaggggagacaattgggaccaacactagaatatcgccctccctctggtcctgagggagaggaatcctcctgggtttccagatcctgtaccagagagtgactctgaggttccgccctgctctctgacacaattaagggataaaatctctgaaggaatgacgggaagacgatccctcgaatactgatgagtggttccctttgacacacacaggcagcagccttgggcccgtgacttttcctctcaggccttgttctctgcttcacactcaatgtgtgtgggggtctgagtccagcacttctgagtccttcagcctccactcaggtcaggaccagaagtcgctgttccctcttcagggactagaattttccacggaataggagattatcccaggtgcctgtgtccaggctggtgtctgggttctgtgctcccttccccatcccaggtgtcctgtccattctcaagatagccacatgtgtgctggaggagtgtcccatgacagatgcaaaatgcctgaatgatctgactcttcctgacagacgcccccaaaacgcatatgactcaccacgctgtctctgaccatgaagccaccctgaggtgctgggccctgagcttctaccctgcggagatcacactgacctggcagcgggatggggaggaccagacccaggacacggagctcgtggagaccaggcctgcaggggatggaaccttccagaagtgggcggctgtggtggtgccttctggacaggagcagagatacacctgccatgtgcagcatgagggtttgcccaagcccctcaccctgagatggggtaaggagggagacgggggtgtcatgtcttttagggaaagcaggagcctctctgacctttagcagggtcagggcccctcaccttcccctcttttcccagagccgtcttcccagcccaccatccccatcgtgggcatcattgctggcctggttctctttggagctgtgatcactggagctgtggtcgctgctgtgatgtggaggaggaagagctcaggtggggaaggggtgaagggtgggtctgagatttcttgtctcactgagggttccaagacccaggtagaagtgtgccctgcctcgttactgggaagcaccacccacaattatgggcctacccagcctgggccctgtgtgccagcacttactcttttgtaaagcacctgttaaaatgaaggacagatttatcaccttgattacagcggtgatgggacctgatcccagcagtcacaagtcacaggggaaggtccctgaggaccttcaggagggcggttggtccaggacccacacctgctttcttcatgtttcctgatcccgccctgggtctgcagtcacacatttctggaaacttctctgaggtccaagacttggaggttcctctaggaccttaaggccctgactcctttctggtatctcacaggacattttcttcccacagatagaaaaggagggagctactctcaggctgcaagtaagtatgaaggaggctgatgcctgaggtccttgggatattgtgtttgggagcccatgggggagctcacccaccccacaattcctcctctagccacatcttctgtgggatctgaccaggttctgtttttgttctaccccaggcagtgacagtgcccagggctctgatgtgtctctcacagcttgtaaaggtgagagcctggagggcctgatgtgtgttgggtgttgggcggaacagtggacacagctgtgctatggggtttctttccattggatgtattgagcatgcgatgggctgtttaaagtgtgacccctcactgtgacagatacgaatttgttcatgaatatttttttctatagtgtga

SEQ ID NO: 8348 - DNA, 3314 bp, Artificial Sequence
  HLA-A*02:01:01 gene sequence
cagaagcagaggggtcagggcgaagtcccagggccccaggcgtggctctcagggtctcaggccccgaaggcggtgtatggattggggagtcccagccttggggattccccaactccgcagtttcttttctccctctcccaacctatgtagggtccttcttcctggatactcacgacgcggacccagttctcactcccattgggtgtcgggtttccagagaagccaatcagtgtcgtcgcggtcgcggttctaaagtccgcacgcacccaccgggactcagattctccccagacgccgaggatggccgtcatggcgccccgaaccctcgtcctgctactctcgggggctctggccctgacccagacctgggcgggtgagtgcggggtcgggagggaaacggcctctgtggggagaagcaacgggcccgcctggcgggggcgcaggacccgggaagccgcgccgggaggagggtcgggcgggtctcagccactcctcgtccccaggctctcactccatgaggtatttcttcacatccgtgtcccggcccggccgcggggagccccgcttcatcgcagtgggctacgtggacgacacgcagttcgtgcggttcgacagcgacgccgcgagccagaggatggagccgcgggcgccgtggatagagcaggagggtccggagtattgggacggggagacacggaaagtgaaggcccactcacagactcaccgagtggacctggggaccctgcgcggctactacaaccagagcgaggccggtgagtgaccccggcccggggcgcaggtcacgacctctcatcccccacggacgggccaggtcgcccacagtctccgggtccgagatccgccccgaagccgcgggaccccgagacccttgccccgggagaggcccaggcgcctttacccggtttcattttcagtttaggccaaaaatccccccaggttggtcggggcggggcggggctcgggggaccgggctgaccgcggggtccgggccaggttctcacaccgtccagaggatgtatggctgcgacgtggggtcggactggcgcttcctccgcgggtaccaccagtacgcctacgacggcaaggattacatcgccctgaaagaggacctgcgctcttggaccgcggcggacatggcagctcagaccaccaagcacaagtgggaggcggcccatgtggcggagcagttgagagcctacctggagggcacgtgcgtggagtggctccgcagatacctggagaacgggaaggagacgctgcagcgcacgggtaccaggggccacggggcgcctccctgatcgcctgtagatctcccgggctggcctcccacaaggaggggagacaattgggaccaacactagaatatcgccctccctctggtcctgagggagaggaatcctcctgggtttccagatcctgtaccagagagtgactctgaggttccgccctgctctctgacacaattaagggataaaatctctgaaggaatgacgggaagacgatccctcgaatactgatgagtggttccctttgacacacacaggcagcagccttgggcccgtgacttttcctctcaggccttgttctctgcttcacactcaatgtgtgtgggggtctgagtccagcacttctgagtccttcagcctccactcaggtcaggaccagaagtcgctgttccctcttcagggactagaattttccacggaataggagattatcccaggtgcctgtgtccaggctggtgtctgggttctgtgctcccttccccatcccaggtgtcctgtccattctcaagatagccacatgtgtgctggaggagtgtcccatgacagatgcaaaatgcctgaatgatctgactcttcctgacagacgcccccaaaacgcatatgactcaccacgccgtctctgaccatgaagccaccctgaggtgctgggccctgagcttctaccctgcggagatcacactgacctggcagcgggatggggaggaccagacccaggacacggagctcgtggagaccaggcctgcaggggatggaaccttccagaagtgggcggctgtggtggtgccttctggacaggagcagagatacacctgccatgtgcagcatgagggtttgcccaagcccctcaccctgagatggggtaaggagggagacgggggtgtcatgtcttttagggaaagcaggagcctctctgacctttagcagggtcagggcccctcaccttcccctcttttcccagagccgtcttcccagcccaccatccccatcgtgggcatcattgctggcctggttctctttggagctgtgatcactggagctgtggtcgctgctgtgatgtggaggaggaagagctcaggtggggaaggggtgaagggtgggtctgagatttcttgtctcactgagggttccaagacccaggtagaagtgtgccctgcctcgttactgggaagcaccacccacaattatgggcctacccagcctgggccctgtgtgccagcacttactcttttgtaaagcacctgttaaaatgaaggacagatttatcaccttgattacagcggtgatgggacctgatcccagcagtcacaagtcacaggggaaggtccctgaggaccttcaggagggcggttggtccaggacccacacctgctttcttcatgtttcctgatcccgccctgggtctgcagtcacacatttctggaaacttctctgaggtccaagacttggaggttcctctaggaccttaaggccctgactcctttctggtatctcacaggacattttcttcccacagatagaaaaggagggagctactctcaggctgcaagtaagtatgaaggaggctgatgcctgaggtccttgggatattgtgtttgggagcccatgggggagctcacccaccccacaattcctcctctagccacatcttctgtgggatctgaccaggttctgtttttgttctaccccaggcagtgacagtgcccagggctctgatgtgtctctcacagcttgtaaaggtgagagcctggagggcctgatgtgtgttgggtgttgggcggaacagtggacacagctgtgctatggggtttctttccattggatgtattgagcatgcgatgggctgtttaaagtgtgacccctcactgtgacagatacgaatttgttcatgaatatttttttctatagtgtgagacagctgccttgtgtgggactgagaggcaagagttgttcctgcccttccctttgtgacttgaagaaccctgactttgtttctgcaaaggcacctgc

SEQ ID NO: 8349 - DNA, 3407 bp, Homo sapiens
tgagacagagcgcttggcacagaagcagaggggtcagggcgaagtcccagggccccaggcgtggctctcagggtctcaggccccgaaggcggtgtatggattggggagtcccagccttggggattccccaactccgcagtttcttttctccctctcccaacctatgtagggtccttcttcctggatactcacgacgcggacccagttctcactcccattgggtgtcgggtttccagagaagccaatcagtgtcgtcgcggtcgcggttctaaagtccgcacgcacccaccgggactcagattctccccagacgccgaggatggccgtcatggcgccccgaaccctcgtcctgctactctcgggggctctggccctgacccagacctgggcgggtgagtgcggggtcgggagggaaacggcctctgtggggagaagcaacgggcccgcctggcgggggcgcaggacccgggaagccgcgccgggaggagggtcgggcgggtctcagccactcctcgtccccaggctctcactccatgaggtatttcttcacatccgtgtcccggcccggccgcggggagccccgcttcatcgcagtgggctacgtggacgacacgcagttcgtgcggttcgacagcgacgccgcgagccagaggatggagccgcgggcgccgtggatagagcaggagggtccggagtattgggacggggagacacggaaagtgaaggcccactcacagactcaccgagtggacctggggaccctgcgcggctactacaaccagagcgaggccggtgagtgaccccggcccggggcgcaggtcacgacctctcatcccccacggacgggccaggtcgcccacagtctccgggtccgagatccgccccgaagccgcgggaccccgagacccttgccccgggagaggcccaggcgcctttacccggtttcattttcagtttaggccaaaaatccccccaggttggtcggggcggggcggggctcgggggaccgggctgaccgcggggtccgggccaggttctcacaccgtccagaggatgtatggctgcgacgtggggtcggactggcgcttcctccgcgggtaccaccagtacgcctacgacggcaaggattacatcgccctgaaagaggacctgcgctcttggaccgcggcggacatggcagctcagaccaccaagcacaagtgggaggcggcccatgtggcggagcagttgagagcctacctggagggcacgtgcgtggagtggctccgcagatacctggagaacgggaaggagacgctgcagcgcacgggtaccaggggccacggggcgcctccctgatcgcctgtagatctcccgggctggcctcccacaaggaggggagacaattgggaccaacactagaatatcgccctccctctggtcctgagggagaggaatcctcctgggtttccagatcctgtaccagagagtgactctgaggttccgccctgctctctgacacaattaagggataaaatctctgaaggaatgacgggaagacgatccctcgaatactgatgagtggttccctttgacacacacaggcagcagccttgggcccgtgacttttcctctcaggccttgttctctgcttcacactcaatgtgtgtgggggtctgagtccagcacttctgagtccttcagcctccactcaggtcaggaccagaagtcgctgttccctcttcagggactagaattttccacggaataggagattatcccaggtgcctgtgtccaggctggtgtctgggttctgtgctcccttccccatcccaggtgtcctgtccattctcaagatagccacatgtgtgctggaggagtgtcccatgacagatgcaaaatgcctgaatgatctgactcttcctgacagacgcccccaaaacgcatatgactcaccacgctgtctctgaccatgaagccaccctgaggtgctgggccctgagcttctaccctgcggagatcacactgacctggcagcgggatggggaggaccagacccaggacacggagctcgtggagaccaggcctgcaggggatggaaccttccagaagtgggcggctgtggtggtgccttctggacaggagcagagatacacctgccatgtgcagcatgagggtttgcccaagcccctcaccctgagatggggtaaggagggagacgggggtgtcatgtcttttagggaaagcaggagcctctctgacctttagcagggtcagggcccctcaccttcccctcttttcccagagccgtcttcccagcccaccatccccatcgtgggcatcattgctggcctggttctctttggagctgtgatcactggagctgtggtcgctgctgtgatgtggaggaggaagagctcaggtggggaaggggtgaagggtgggtctgagatttcttgtctcactgagggttccaagacccaggtagaagtgtgccctgcctcgttactgggaagcaccacccacaattatgggcctacccagcctgggccctgtgtgccagcacttactcttttgtaaagcacctgttaaaatgaaggacagatttatcaccttgattacagcggtgatgggacctgatcccagcagtcacaagtcacaggggaaggtccctgaggaccttcaggagggcggttggtccaggacccacacctgctttcttcatgtttcctgatcccgccctgggtctgcagtcacacatttctggaaacttctctgaggtccaagacttggaggttcctctaggaccttaaggccctgactcctttctggtatctcacaggacattttcttcccacagatagaaaaggagggagctactctcaggctgcaagtaagtatgaaggaggctgatgcctgaggtccttgggatattgtgtttgggagcccatgggggagctcacccaccccacaattcctcctctagccacatcttctgtgggatctgaccaggttctgtttttgttctaccccaggcagtgacagtgcccagggctctgatgtgtctctcacagcttgtaaaggtgagagcctggagggcctgatgtgtgttgggtgttgggcggaacagtggacacagctgtgctatggggtttctttccattggatgtattgagcatgcgatgggctgtttaaagtgtgacccctcactgtgacagatacgaatttgttcatgaatatttttttctatagtgtgagacagctgccttgtgtgggactgagaggcaagagttgttcctgcccttccctttgtgacttgaagaaccctgactttgtttctgcaaaggcacctgcatgtgtctgtgttcgtgtaggcataatgtgaggaggtggggagaccaccccacccccatgtccaccatgaccct

SEQ ID NO: 8350 - protein, 1368 aa, Artificial Sequence [sequence omitted]

SEQ ID NO: 8351 - protein, 43 aa, Artificial Sequence; identical to SEQ ID NO: 75
  Target HLA Sequence complement

SEQ ID NO: 8352 - protein, 44 aa, Artificial Sequence
  Short Hinge 2
VVSGPSGGPSSPTTGPTSTSGPEDQPLTPTGSDPQSGLGRHLGV

SEQ ID NO: 8353 - protein, 67 aa, Artificial Sequence
  Long Hinge 1
AGSGGSGGSGGSPVPSTPPTPSPSTPPTPSPSGGSGNSSGSGGSPVPSTPPTPSPSTPPTPSPSASV

SEQ ID NO: 8354 - protein, 75 aa, Artificial Sequence
  Long Hinge 2
AGSGGSGGSGGSPVPSTPPTNSSSTPPTPSPSPVPSTPPTNSSSTPPTPSPSPVPSTPPTNSSSTPPTPSPSASV

SEQ ID NO: 8355 - protein, 85 aa, Artificial Sequence
  2x Short Hinge
VVSGPSGGPSSPTTGPTSTSGPEDQPLTPTGSDPQSGLGRHVVSGPSGGPSSPTTGPTSTSGPEDQPLTPTGSDPQSGLGRHLGV

SEQ ID NO: 8356 - protein, 32 aa, Artificial Sequence
  Hinge (truncated)
TTGPTSTSGPEDQPLTPTGSDPQSGLGRHLGV

SEQ ID NO: 8357 - DNA, 20 bp, Artificial Sequence
  B2M CDS targeting gRNA
cgcgagcacagctaaggcca

SEQ ID NO: 8358 - DNA, 20 bp, Artificial Sequence
  B2M CDS targeting gRNA
gagtagcgcgagcacagcta

SEQ ID NO: 8359 - DNA, 20 bp, Artificial Sequence
  B2M CDS targeting gRNA
agggtaggagagactcacgc

SEQ ID NO: 8360 - DNA, 20 bp, Artificial Sequence
  B2M CDS targeting gRNA
ctgaatctttggagtacctg

SEQ ID NO: 8361 - DNA, 20 bp, Artificial Sequence
  B2M CDS targeting gRNA
tcacgtcatccagcagagaa

SEQ ID NO: 8362 - DNA, 20 bp, Artificial Sequence
  B2M CDS targeting gRNA
tcctgaattgctatgtgtct

SEQ ID NO: 8363 - DNA, 20 bp, Artificial Sequence
  B2M CDS targeting gRNA
aagtcaacttcaatgtcgga

SEQ ID NO: 8364 - DNA, 20 bp, Artificial Sequence
  B2M CDS targeting gRNA
gtcttttcccgatattcctc

SEQ ID NO: 8365 - DNA, 20 bp, Artificial Sequence
  B2M CDS targeting gRNA
tggagtacctgaggaatatc

SEQ ID NO: 8366 - DNA, 20 bp, Artificial Sequence
  B2M CDS targeting gRNA
cagcccaagatagttaagtg

SEQ ID NO: 8367 - DNA, 20 bp, Artificial Sequence
  B2M CDS targeting gRNA
acaaagtcacatggttcaca

SEQ ID NO: 8368 - DNA, 20 bp, Artificial Sequence
  B2M CDS targeting gRNA
actctctctttctggcctgg

SEQ ID NO: 8369 - DNA, 20 bp, Artificial Sequence
  B2M CDS targeting gRNA
tgggctgtgacaaagtcaca

SEQ ID NO: 8370 - DNA, 20 bp, Artificial Sequence
  B2M CDS targeting gRNA
ggccgagatgtctcgctccg

SEQ ID NO: 8371 - DNA, 20 bp, Artificial Sequence
  B2M CDS targeting gRNA
cagtaagtcaacttcaatgt

SEQ ID NO: 8372 - DNA, 20 bp, Artificial Sequence
  B2M CDS targeting gRNA
actcacgctggatagcctcc

SEQ ID NO: 8373 - DNA, 20 bp, Artificial Sequence
  B2M CDS targeting gRNA
catactcatctttttcagtg

SEQ ID NO: 8374 - DNA, 20 bp, Artificial Sequence
  B2M CDS targeting gRNA
cacagcccaagatagttaag

SEQ ID NO: 8375 - DNA, 20 bp, Artificial Sequence
  B2M CDS targeting gRNA
ttcagacttgtctttcagca

SEQ ID NO: 8376 - DNA, 20 bp, Artificial Sequence
  B2M CDS targeting gRNA
agtcacatggttcacacggc

SEQ ID NO: 8377 - DNA, 20 bp, Artificial Sequence
  B2M CDS targeting gRNA
atactcatctttttcagtgg

SEQ ID NO: 8378 - DNA, 20 bp, Artificial Sequence
  B2M CDS targeting gRNA
ggcatactcatctttttcag

SEQ ID NO: 8379 - DNA, 20 bp, Artificial Sequence
  B2M CDS targeting gRNA
acagcccaagatagttaagt

SEQ ID NO: 8380 - DNA, 20 bp, Artificial Sequence
  B2M CDS targeting gRNA
gctactctctctttctggcc

SEQ ID NO: 8381 - DNA, 20 bp, Artificial Sequence
  B2M CDS targeting gRNA
tggagagagaattgaaaaag

SEQ ID NO: 8382 - DNA, 20 bp, Artificial Sequence
  B2M CDS targeting gRNA
acttgtctttcagcaaggac

SEQ ID NO: 8383 - DNA, 20 bp, Artificial Sequence
  B2M CDS targeting gRNA
gaagttgacttactgaagaa

SEQ ID NO: 8384 - DNA, 20 bp, Artificial Sequence
  B2M CDS targeting gRNA
ggccacggagcgagacatct

SEQ ID NO: 8385 - DNA, 20 bp, Artificial Sequence
  B2M CDS targeting gRNA
gcatactcatctttttcagt

SEQ ID NO: 8386 - DNA, 20 bp, Artificial Sequence
  B2M CDS targeting gRNA
cgtgagtaaacctgaatctt

SEQ ID NO: 8387 - DNA, 20 bp, Artificial Sequence
  B2M CDS targeting gRNA
ttaccccacttaactatctt

SEQ ID NO: 8388 - DNA, 20 bp, Artificial Sequence
  B2M CDS targeting gRNA
ttggagtacctgaggaatat

SEQ ID NO: 8389 - DNA, 20 bp, Artificial Sequence
  B2M CDS targeting gRNA
acccagacacatagcaattc

SEQ ID NO: 8390 - DNA, 20 bp, Artificial Sequence
  B2M CDS targeting gRNA
tttgactttccattctctgc

SEQ ID NO: 8391 - DNA, 20 bp, Artificial Sequence
  B2M CDS targeting gRNA
ttcctgaattgctatgtgtc

SEQ ID NO: 8392 - DNA, 20 bp, Artificial Sequence
  B2M CDS targeting gRNA
ctcaggtactccaaagattc

SEQ ID NO: 8393 - DNA, 20 bp, Artificial Sequence
  B2M CDS targeting gRNA
cttaccccacttaactatct

SEQ ID NO: 8394 - DNA, 20 bp, Artificial Sequence
  B2M CDS targeting gRNA
ctcgcgctactctctctttc

SEQ ID NO: 8395 - DNA, 20 bp, Artificial Sequence
  B2M CDS targeting gRNA
tcgatctatgaaaaagacag

SEQ ID NO: 8396 - DNA, 20 bp, Artificial Sequence
  B2M CDS targeting gRNA
gagacatgtaagcagcatca

SEQ ID NO: 8397 - DNA, 20 bp, Artificial Sequence
  B2M CDS targeting gRNA
acatgtaagcagcatcatgg

SEQ ID NO: 8398 - DNA, 20 bp, Artificial Sequence
  B2M promoter targeting gRNA
gaagtcctagaatgagcgcc

SEQ ID NO: 8399 - DNA, 20 bp, Artificial Sequence
  B2M promoter targeting gRNA
gagcgcccggtgtcccaagc

SEQ ID NO: 8400 - DNA, 20 bp, Artificial Sequence
  B2M promoter targeting gRNA
agcgcccggtgtcccaagct

SEQ ID NO: 8401 - DNA, 20 bp, Artificial Sequence
  B2M promoter targeting gRNA
gcgcccggtgtcccaagctg

SEQ ID NO: 8402 - DNA, 20 bp, Artificial Sequence
  B2M promoter targeting gRNA
ctggggcgcgcaccccagat

SEQ ID NO: 8403 - DNA, 20 bp, Artificial Sequence
  B2M promoter targeting gRNA
gggcgcgcaccccagatcgg

SEQ ID NO: 8404 - DNA, 20 bp, Artificial Sequence
  B2M promoter targeting gRNA
ggcgcgcaccccagatcgga

SEQ ID NO: 8405 - DNA, 20 bp, Artificial Sequence
  B2M promoter targeting gRNA
catcacgagactctaagaaa

SEQ ID NO: 8406 - DNA, 20 bp, Artificial Sequence
  B2M promoter targeting gRNA
taagaaaaggaaactgaaaa

SEQ ID NO: 8407 - DNA, 20 bp, Artificial Sequence
  B2M promoter targeting gRNA
aagaaaaggaaactgaaaac

SEQ ID NO: 8408 - DNA, 20 bp, Artificial Sequence
  B2M promoter targeting gRNA
gaaagtccctctctctaacc

SEQ ID NO: 8409 - DNA, 20 bp, Artificial Sequence
  B2M promoter targeting gRNA
ctaacctggcactgcgtcgc

SEQ ID NO: 8410 - DNA, 20 bp, Artificial Sequence
  B2M promoter targeting gRNA
ctggcactgcgtcgctggct

SEQ ID NO: 8411 - DNA, 20 bp, Artificial Sequence
  B2M promoter targeting gRNA
tgcgtcgctggcttggagac

SEQ ID NO: 8412 - DNA, 20 bp, Artificial Sequence
  B2M promoter targeting gRNA
gctggcttggagacaggtga

SEQ ID NO: 8413 - DNA, 20 bp, Artificial Sequence
  B2M promoter targeting gRNA
gagacaggtgacggtccctg

SEQ ID NO: 8414 - DNA, 20 bp, Artificial Sequence
  B2M promoter targeting gRNA
agacaggtgacggtccctgc

SEQ ID NO: 8415 - DNA, 20 bp, Artificial Sequence
  B2M promoter targeting gRNA
cctgcgggccttgtcctgat

SEQ ID NO: 8416 - DNA, 20 bp, Artificial Sequence
  B2M promoter targeting gRNA
cgggccttgtcctgattggc

SEQ ID NO: 8417 - DNA, 20 bp, Artificial Sequence
  B2M promoter targeting gRNA
gggccttgtcctgattggct

SEQ ID NO: 8418 - DNA, 20 bp, Artificial Sequence
  B2M promoter targeting gRNA
gggcacgcgtttaatataag

SEQ ID NO: 8419 - DNA, 20 bp, Artificial Sequence
  B2M promoter targeting gRNA
cacgcgtttaatataagtgg

SEQ ID NO: 8420 - DNA, 20 bp, Artificial Sequence
  B2M promoter targeting gRNA
tataagtggaggcgtcgcgc

SEQ ID NO: 8421 - DNA, 20 bp, Artificial Sequence
  B2M promoter targeting gRNA
aagtggaggcgtcgcgctgg

SEQ ID NO: 8422 - DNA, 20 bp, Artificial Sequence
  B2M promoter targeting gRNA
agtggaggcgtcgcgctggc

SEQ ID NO: 8423 - DNA, 20 bp, Artificial Sequence
  B2M promoter targeting gRNA
ttcctgaagctgacagcatt

SEQ ID NO: 8424 - DNA, 20 bp, Artificial Sequence
  B2M promoter targeting gRNA
tcctgaagctgacagcattc

SEQ ID NO: 8425 - DNA, 20 bp, Artificial Sequence
  B2M promoter targeting gRNA
gcccgaatgctgtcagcttc

SEQ ID NO: 8426 - DNA, 20 bp, Artificial Sequence
  B2M promoter targeting gRNA
aaacgcgtgcccagccaatc

SEQ ID NO: 8427 - DNA, 20 bp, Artificial Sequence
  B2M promoter targeting gRNA
gtgcccagccaatcaggaca

SEQ ID NO: 8428 - DNA, 20 bp, Artificial Sequence
  B2M promoter targeting gRNA
ccaatcaggacaaggcccgc

SEQ ID NO: 8429 - DNA, 20 bp, Artificial Sequence
  B2M promoter targeting gRNA
caatcaggacaaggcccgca

SEQ ID NO: 8430 - DNA, 20 bp, Artificial Sequence
  B2M promoter targeting gRNA
caagccagcgacgcagtgcc

SEQ ID NO: 8431 - DNA, 20 bp, Artificial Sequence
  B2M promoter targeting gRNA
cgcagtgccaggttagagag

SEQ ID NO: 8432 - DNA, 20 bp, Artificial Sequence
  B2M promoter targeting gRNA
gcagtgccaggttagagaga

SEQ ID NO: 8433 - DNA, 20 bp, Artificial Sequence
  B2M promoter targeting gRNA
gagtctcgtgatgtttaaga

SEQ ID NO: 8434 - DNA, 20 bp, Artificial Sequence
  B2M promoter targeting gRNA
taagaaggcatgcactagac

SEQ ID NO: 8435 - DNA, 20 bp, Artificial Sequence
  B2M promoter targeting gRNA
aagaaggcatgcactagact

SEQ ID NO: 8436 - DNA, 20 bp, Artificial Sequence
  B2M promoter targeting gRNA
tgagtttgctgtctgtacat

SEQ ID NO: 8437 - DNA, 20 bp, Artificial Sequence
  B2M promoter targeting gRNA
tacatcggcgccctccgatc

SEQ ID NO: 8438 - DNA, 20 bp, Artificial Sequence
  B2M promoter targeting gRNA
acatcggcgccctccgatct

SEQ ID NO: 8439 - DNA, 20 bp, Artificial Sequence
  B2M promoter targeting gRNA
catcggcgccctccgatctg

SEQ ID NO: 8440 - DNA, 20 bp, Artificial Sequence
  B2M promoter targeting gRNA
ctggggtgcgcgccccagct

SEQ ID NO: 8441 - DNA, 20 bp, Artificial Sequence
  B2M promoter targeting gRNA
tggggtgcgcgccccagctt

SEQ ID NO: 8442 - DNA, 20 bp, Artificial Sequence
  B2M promoter targeting gRNA
cgcgccccagcttgggacac

SEQ ID NO: 8443 - DNA, 20 bp, Artificial Sequence
  B2M promoter targeting gRNA
gcgccccagcttgggacacc

SEQ ID NO: 8444 - DNA, 20 bp, Artificial Sequence
  B2M promoter targeting gRNA
caagtcacttagcatctctg

SEQ ID NO: 8445 - DNA, 20 bp, Artificial Sequence
  B2M promoter targeting gRNA
acagaagttctccttctgct

SEQ ID NO: 8446 - DNA, 20 bp, Artificial Sequence
  B2M promoter targeting gRNA
attcaaagatcttaatcttc

SEQ ID NO: 8447 - DNA, 20 bp, Artificial Sequence
  B2M promoter targeting gRNA
ttcaaagatcttaatcttct

SEQ ID NO: 8448 - DNA, 20 bp, Artificial Sequence
  B2M promoter targeting gRNA
ttttctcgaatgaaaaatgc

SEQ ID NO: 8449 - DNA, 20 bp, Artificial Sequence
  B2M promoter targeting gRNA
tgcaggtccgagcagttaac

SEQ ID NO: 8450 - DNA, 20 bp, Artificial Sequence
  B2M promoter targeting gRNA
ggtccgagcagttaactggc

SEQ ID NO: 8451 - DNA, 20 bp, Artificial Sequence
  B2M promoter targeting gRNA
gtccgagcagttaactggct

SEQ ID NO: 8452 - DNA, 20 bp, Artificial Sequence
  B2M promoter targeting gRNA
tccgagcagttaactggctg

SEQ ID NO: 8453 - DNA, 20 bp, Artificial Sequence
  B2M promoter targeting gRNA
agcaagtcacttagcatctc

SEQ ID NO: 8454 - DNA, 20 bp, Artificial Sequence
  B2M promoter targeting gRNA
gcaagtcacttagcatctct

SEQ ID NO: 8455 - DNA, 20 bp, Artificial Sequence
  B2M promoter targeting gRNA
tggggccagtctgcaaagcg

SEQ ID NO: 8456 - DNA, 20 bp, Artificial Sequence
  B2M promoter targeting gRNA
ggggccagtctgcaaagcga

SEQ ID NO: 8457 - DNA, 20 bp, Artificial Sequence
  B2M promoter targeting gRNA
gggccagtctgcaaagcgag

SEQ ID NO: 8458 - DNA, 20 bp, Artificial Sequence
  B2M promoter targeting gRNA
ggccagtctgcaaagcgagg

SEQ ID NO: 8459 - DNA, 20 bp, Artificial Sequence
  B2M promoter targeting gRNA
ggacaccgggcgctcattct

SEQ ID NO: 8460 - DNA, 20 bp, Artificial Sequence
  B2M promoter targeting gRNA
ggcgctcattctaggacttc

SEQ ID NO: 8461 - DNA, 20 bp, Artificial Sequence
  B2M promoter targeting gRNA
ctcattctaggacttcaggc

SEQ ID NO: 8462 - DNA, 20 bp, Artificial Sequence
  B2M promoter targeting gRNA
attctaggacttcaggctgg

SEQ ID NO: 8463 - DNA, 20 bp, Artificial Sequence
  B2M promoter targeting gRNA
ttcaggctggaggcacatta

SEQ ID NO: 8464 - DNA, 20 bp, Artificial Sequence
  B2M promoter targeting gRNA
tgccccctcgctttgcagac

SEQ ID NO: 8465 - DNA, 20 bp, Artificial Sequence
  B2M promoter targeting gRNA
gatgctaagtgacttgctaa

SEQ ID NO: 8466 - DNA, 20 bp, Artificial Sequence
  B2M promoter targeting gRNA
gccccagccagttaactgct

SEQ ID NO: 8467 - DNA, 20 bp, Artificial Sequence
  B2M promoter targeting gRNA
gcatttttcattcgagaaaa

SEQ ID NO: 8468 - DNA, 20 bp, Artificial Sequence
  B2M promoter targeting gRNA
tttgaatgctacctagcaga

SEQ ID NO: 8469 - DNA, 20 bp, Artificial Sequence
  B2M promoter targeting gRNA
ttctgtttataactacagct

SEQ ID NO: 8470 - DNA, 20 bp, Artificial Sequence
  B2M promoter targeting gRNA
tctgtttataactacagctt

SEQ ID NO: 8471 - DNA, 6654 bp, Artificial Sequence
  B2M Gene GenBank 567
aagtggaggcgtcgcgctggcgggcattcctgaagctgacagcattcgggccgagatgtctcgctccgtggccttagctgtgctcgcgctactctctctttctggcctggaggctatccagcgtgagtctctcctaccctcccgctctggtccttcctctcccgctctgcaccctctgtggccctcgctgtgctctctcgctccgtgacttcccttctccaagttctccttggtggcccgccgtggggctagtccagggctggatctcggggaagcggcggggtggcctgggagtggggaagggggtgcgcacccgggacgcgcgctacttgcccctttcggcggggagcaggggagacctttggcctacggcgacgggagggtcgggacaaagtttagggcgtcgataagcgtcagagcgccgaggttgggggagggtttctcttccgctctttcgcggggcctctggctcccccagcgcagctggagtgggggacgggtaggctcgtcccaaaggcgcggcgctgaggtttgtgaacgcgtggaggggcgcttggggtctgggggaggcgtcgcccgggtaagcctgtctgctgcggctctgcttcccttagactggagagctgtggacttcgtctaggcgcccgctaagttcgcatgtcctagcacctctgggtctatgtggggccacaccgtggggaggaaacagcacgcgacgtttgtagaatgcttggctgtgatacaaagcggtttcgaataattaacttatttgttcccatcacatgtcacttttaaaaaattataagaactacccgttattgacatctttctgtgtgccaaggactttatgtgctttgcgtcatttaattttgaaaacagttatcttccgccatagataactactatggttatcttctgcctctcacagatgaagaaactaaggcaccgagattttaagaaacttaattacacaggggataaatggcagcaatcgagattgaagtcaagcctaaccagggcttttgcgggagcgcatgccttttggctgtaattcgtgcatttttttttaagaaaaacgcctgccttctgcgtgagattctccagagcaaactgggcggcatgggccctgtggtcttttcgtacagagggcttcctctttggctctttgcctggttgtttccaagatgtactgtgcctcttactttcggttttgaaaacatgagggggttgggcgtggtagcttacgcctgtaatcccagcacttagggaggccgaggcgggaggatggcttgaggtccgtagttgagaccagcctggccaacatggtgaagcctggtctctacaaaaaataataacaaaaattagccgggtgtggtggctcgtgcctgtggtcccagctgctccggtggctgaggcgggaggatctcttgagcttaggcttttgagctatcatggcgccagtgcactccagcgtgggcaacagagcgagaccctgtctctcaaaaaagaaaaaaaaaaaaaaagaaagagaaaagaaaagaaagaaagaagtgaaggtttgtcagtcaggggagctgtaaaaccattaataaagataatccaagatggttaccaagactgttgaggacgccagagatcttgagcactttctaagtacctggcaatacactaagcgcgctcaccttttcctctggcaaaacatgatcgaaagcagaatgttttgatcatgagaaaattgcatttaatttgaatacaatttatttacaacataaaggataatgtatatatcaccaccattactggtatttgctggttatgttagatgtcattttaaaaaataacaatctgatatttaaaaaaaaatcttattttgaaaatttccaaagtaatacatgccatgcatagaccatttctggaagataccacaagaaacatgtaatgatgattgcctctgaaggtctattttcctcctctgacctgtgtgtgggttttgtttttgttttactgtgggcataaattaatttttcagttaagttttggaagcttaaataactctccaaaagtcataaagccagtaactggttgagcccaaattcaaacccagcctgtctgatacttgtcctcttcttagaaaagattacagtgatgctctcacaaaatcttgccgccttccctcaaacagagagttccaggcaggatgaatctgtgctctgatccctgaggcatttaatatgttcttattattagaagctcagatgcaaagagctctcttagcttttaatgttatgaaaaaaatcaggtcttcattagattccccaatccacctcttgatggggctagtagcctttccttaatgatagggtgtttctagagagatatatctggtcaaggtggcctggtactcctccttctccccacagcctcccagacaaggaggagtagctgccttttagtgatcatgtaccctgaatataagtgtatttaaaagaattttatacacatatatttagtgtcaatctgtatatttagtagcactaacacttctcttcattttcaatgaaaaatatagagtttataatattttcttcccacttccccatggatggtctagtcatgcctctcattttggaaagtactgtttctgaaacattaggcaatatattcccaacctggctagtttacagcaatcacctgtggatgctaattaaaacgcaaatcccactgtcacatgcattactccatttgatcataatggaaagtatgttctgtcccatttgccatagtcctcacctatccctgttgtattttatcgggtccaactcaaccatttaaggtatttgccagctcttgtatgcatttaggttttgtttctttgttttttagctcatgaaattaggtacaaagtcagagaggggtctggcatataaaacctcagcagaaataaagaggttttgttgtttggtaagaacataccttgggttggttgggcacggtggctcgtgcctgtaatcccaacactttgggaggccaaggcaggctgatcacttgaagttgggagttcaagaccagcctggccaacatggtgaaatcccgtctctactgaaaatacaaaaattaaccaggcatggtggtgtgtgcctgtagtcccaggaatcacttgaacccaggaggcggaggttgcagtgagctgagatctcaccactgcacactgcactccagcctgggcaatggaatgagattccatcccaaaaaataaaaaaataaaaaaataaagaacataccttgggttgatccacttaggaacctcagataataacatctgccacgtatagagcaattgctatgtcccaggcactctactagacacttcatacagtttagaaaatcagatgggtgtagatcaaggcaggagcaggaaccaaaaagaaaggcataaacataagaaaaaaaatggaaggggtggaaacagagtacaataacatgagtaatttgatgggggctattatgaactgagaaatgaactttgaaaagtatcttggggccaaatcatgtagactcttgagtgatgtgttaaggaatgctatgagtgctgagagggcatcagaagtccttgagagcctccagagaaaggctcttaaaaatgcagcgcaatctccagtgacagaagatactgctagaaatctgctagaaaaaaaacaaaaaaggcatgtatagaggaattatgagggaaagataccaagtcacggtttattcttcaaaatggaggtggcttgttgggaaggtggaagctcatttggccagagtggaaatggaattgggagaaatcgatgaccaaatgtaaacacttggtgcctgatatagcttgacaccaagttagccccaagtgaaataccctggcaatattaatgtgtcttttcccgatattcctcaggtactccaaagattcaggtttactcacgtcatccagcagagaatggaaagtcaaatttcctgaattgctatgtgtctgggtttcatccatccgacattgaagttgacttactgaagaatggagagagaattgaaaaagtggagcattcagacttgtctttcagcaaggactggtctttctatctcttgtactacactgaattcacccccactgaaaaagatgagtatgcctgccgtgtgaaccatgtgactttgtcacagcccaagatagttaagtggggtaagtcttacattcttttgtaagctgctgaaagttgtgtatgagtagtcatatcataaagctgctttgatataaaaaaggtctatggccatactaccctgaatgagtcccatcccatctgatataaacaatctgcatattgggattgtcagggaatgttcttaaagatcagattagtggcacctgctgagatactgatgcacagcatggtttctgaaccagtagtttccctgcagttgagcagggagcagcagcagcacttgcacaaatacatatacactcttaacacttcttacctactggcttcctctagcttttgtggcagcttcaggtatatttagcactgaacgaacatctcaagaaggtataggcctttgtttgtaagtcctgctgtcctagcatcctataatcctggacttctccagtactttctggctggattggtatctgaggctagtaggaagggcttgttcctgctgggtagctctaaacaatgtattcatgggtaggaacagcagcctattctgccagccttatttctaaccattttagacatttgttagtacatggtattttaaaagtaaaacttaatgtcttccttttttttctccactgtctttttcatagatcgagacatgtaagcagcatcatggaggtaagtttttgaccttgagaaaatgtttttgtttcactgtcctgaggactatttatagacagctctaacatgataaccctcactatgtggagaacattgacagagtaacattttagcagggaaagaagaatcctacagggtcatgttcccttctcctgtggagtggcatgaagaaggtgtatggccccaggtatggccatattactgaccctctacagagagggcaaaggaactgccagtatggtattgcaggataaaggcaggtggttacccacattacctgcaaggctttgatctttcttctgccatttccacattggacatctctgctgaggagagaaaatgaaccactcttttcctttgtataatgttgttttattcttcagacagaagagaggagttatacagctctgcagacatcccattcctgtatggggactgtgtttgcctcttagaggttcccaggccactagaggagataaagggaaacagattgttataacttgatataatgatactataatagatgtaactacaaggagctccagaagcaagagagagggaggaacttggacttctctgcatctttagttggagtccaaaggcttttcaatgaaattctactgcccagggtacattgatgctgaaaccccattcaaatctcctgttatattctagaacagggaattgatttgggagagcatcaggaaggtggatgatctgcccagtcacactgttagtaaattgtagagccaggacctgaactctaatatagtcatgtgttacttaatgacggggacatgttctgagaaatgcttacacaaacctaggtgttgtagcctactacacgcataggctacatggtatagcctattgctcctagactacaaacctgtacagcctgttactgtactgaatactgtgggcagttgtaacacaatggtaagtatttgtgtatctaaacatagaagttgcagtaaaaatatgctattttaatcttatgagaccactgtcatatatacagtccatcattgaccaaaacatcatatcagcattttttcttctaagattttgggagcaccaaagggatacactaacaggatatactctttataatgggtttggagaactgtctgcagctacttcttttaaaaaggtgatctacacagtagaaattagacaagtttggtaatgagatctgcaatccaaataaaataaattcattgctaacctttttcttttcttttcaggtttgaagatgccgcatttggattggatgaattccaaattctgcttgcttgctttttaatattgatatgcttatacacttacactttatgcacaaaatgtagggttataataatgttaacatggacatgatcttctttataattctactttgagtgctgtctccatgtttgatgtatctgagcaggttgctccacaggtagctctaggagggctggcaacttagaggtggggagcagagaattctcttatccaacatcaacatcttggtcagatttgaactcttcaatctcttgcactcaaagcttgttaagatagttaagcgtgcataagttaacttccaatttacatactctgcttagaatttgggggaaaatttagaaatataattgacaggattattggaaatttgttataatgaatgaaacattttgtcatataagattcatatttacttcttatacatttgataaagtaaggcatggttgtggttaatctggtttatttttgttccacaagttaaataaatcataaaacttga

SEQ ID NO: 8472 - DNA, 502 bp, Artificial Sequence
  Extended B2M promoter region
gaattcccaagctgtagttataaacagaagttctccttctgctaggtagcattcaaagatcttaatcttctgggtttccgttttctcgaatgaaaaatgcaggtccgagcagttaactggctggggcaccattagcaagtcacttagcatctctggggccagtctgcaaagcgagggggcagccttaatgtgcctccagcctgaagtcctagaatgagcgcccggtgtcccaagctggggcgcgcaccccagatcggagggcgccgatgtacagacagcaaactcacccagtctagtgcatgccttcttaaacatcacgagactctaagaaaaggaaactgaaaacgggaaagtccctctctctaacctggcactgcgtcgctggcttggagacaggtgacggtccctgcgggccttgtcctgattggctgggcacgcgtttaatataagtggaggcgtcgcgctggcgggcattcctgaagctgacagcattcgggccgag

SEQ ID NO: 8473 - RNA, 83 nt, Artificial Sequence
  scaffold sequence
guuuuagagcuagaaauagcaaguuaaaauaaggcuaguccguuaucaacuugaaaaaguggcaccgagucggugcuuuuuuu

SEQ ID NO: 8474 - protein, 64 aa, Artificial Sequence
  Hinge (iTIM hinge)
YGSQSSKPYLLTHPSDPLELVVSGPSGGPSSPTTGPTSTSGPEDQPLTPTGSDPQSGLGRHLGV

SEQ ID NO: 8475 - protein, 32 aa, Artificial Sequence; identical to SEQ ID NO: 8356
  Hinge (truncated)

SEQ ID NO: 8476 - DNA, 21 bp, Artificial Sequence
  Target HLA Sequence complement
cttcttccttccctattaaaa

SEQ ID NO: 8477 - DNA, 21 bp, Artificial Sequence
  Target HLA Sequence complement
tctcactccatgaggtatttc

SEQ ID NO: 8478 - DNA, 21 bp, Artificial Sequence
  Target HLA Sequence complement
ctctcactccatgaggtattt

SEQ ID NO: 8479 - DNA, 21 bp, Artificial Sequence
  Target HLA Sequence complement
gaggaggaagagctcagatag

SEQ ID NO: 8480 - DNA, 21 bp, Artificial Sequence
  Target HLA Sequence complement
gctctcactccatgaggtatt

SEQ ID NO: 8481 - DNA, 21 bp, Artificial Sequence
  Target HLA Sequence complement
aggattacatcgccctgaaag

SEQ ID NO: 8482 - DNA, 21 bp, Artificial Sequence
  Target HLA Sequence complement
acaccgtccagaggatgtatg

SEQ ID NO: 8483 - DNA, 21 bp, Artificial Sequence
  Target HLA Sequence complement
agggtccttcttcctggatac

SEQ ID NO: 8484 - DNA, 21 bp, Artificial Sequence
  Target HLA Sequence complement
cctacgacggcaaggattaca

SEQ ID NO: 8485 - DNA, 21 bp, Artificial Sequence
  Target HLA Sequence complement
tcactccatgaggtatttctt

SEQ ID NO: 8486 - DNA, 21 bp, Artificial Sequence
  Target HLA Sequence complement
ctacgacggcaaggattacat

SEQ ID NO: 8487 - DNA, 21 bp, Artificial Sequence
  Target HLA Sequence complement
ctcactccatgaggtatttct

SEQ ID NO: 8488 - DNA, 21 bp, Artificial Sequence
  Target HLA Sequence complement
ggaggaagagctcagatagaa

SEQ ID NO: 8489 - DNA, 21 bp, Artificial Sequence
  Target HLA Sequence complement
cacaccgtccagaggatgtat

SEQ ID NO: 8490 - DNA, 21 bp, Artificial Sequence
  Target HLA Sequence complement
cacgctgtctctgaccatgaa

SEQ ID NO: 8491 - DNA, 21 bp, Artificial Sequence
  Target HLA Sequence complement
ctggacaggagcagagataca

SEQ ID NO: 8492 - DNA, 21 bp, Artificial Sequence
  Target HLA Sequence complement
tggaggaggaagagctcagat

SEQ ID NO: 8493 - DNA, 21 bp, Artificial Sequence
  Target HLA Sequence complement
ggctctcactccatgaggtat

SEQ ID NO: 8494 - DNA, 21 bp, Artificial Sequence
  Target HLA Sequence complement
catctctgtctcaacttcatg

SEQ ID NO: 8495 - DNA, 21 bp, Artificial Sequence
  Target HLA Sequence complement
tacgacggcaaggattacatc

SEQ ID NO: 8496 - DNA, 21 bp, Artificial Sequence
  Target HLA Sequence complement
ggattacatcgccctgaaaga

SEQ ID NO: 8497 - DNA, 21 bp, Artificial Sequence
  Target HLA Sequence complement
gattacatcgccctgaaagag

SEQ ID NO: 8498 - DNA, 21 bp, Artificial Sequence
  Target HLA Sequence complement
ctcagaccaccaagcacaagt

SEQ ID NO: 8499 - DNA, 21 bp, Artificial Sequence
  Target HLA Sequence complement
tcacaccgtccagaggatgta

SEQ ID NO: 8500 - DNA, 21 bp, Artificial Sequence
  Target HLA Sequence complement
actccatgaggtatttcttca

SEQ ID NO: 8501 - DNA, 21 bp, Artificial Sequence
  Target HLA Sequence complement
cactccatgaggtatttcttc

SEQ ID NO: 8502 - DNA, 21 bp, Artificial Sequence
  Target HLA Sequence complement
ccatgaggtatttcttcacat

SEQ ID NO: 8503 - DNA, 21 bp, Artificial Sequence
  Target HLA Sequence complement
acttcttccttccctattaaa

SEQ ID NO: 8504 - DNA, 21 bp, Artificial Sequence
  Target HLA Sequence complement
gtgtctctcacagcttgtaaa

SEQ ID NO: 8505 - DNA, 21 bp, Artificial Sequence
  Target HLA Sequence complement
ctgtgttcgtgtaggcataat

SEQ ID NO: 8506 - DNA, 21 bp, Artificial Sequence
  Target HLA Sequence complement
tgtgttcgtgtaggcataatg

SEQ ID NO: 8507 - DNA, 21 bp, Artificial Sequence
  Target HLA Sequence complement
taacttcttccttccctatta

SEQ ID NO: 8508 - DNA, 21 bp, Artificial Sequence
  Target HLA Sequence complement
tctggacaggagcagagatac

SEQ ID NO: 8509 - DNA, 21 bp, Artificial Sequence
  Target HLA Sequence complement
ttgctggcctggttctctttg

SEQ ID NO: 8510 - DNA, 21 bp, Artificial Sequence
  Target HLA Sequence complement
tgtctctcacagcttgtaaag

SEQ ID NO: 8511 - DNA, 21 bp, Artificial Sequence
  Target HLA Sequence complement
acttgaagaaccctgactttg

SEQ ID NO: 8512 - DNA, 21 bp, Artificial Sequence
  Target HLA Sequence complement
gaagaaccctgactttgtttc

SEQ ID NO: 8513 - DNA, 21 bp, Artificial Sequence
  Target HLA Sequence complement
tctgtgttcgtgtaggcataa

SEQ ID NO: 8514 - DNA, 21 bp, Artificial Sequence
  Target HLA Sequence complement
catggtgcactgagctgtaac

SEQ ID NO: 8515 - DNA, 21 bp, Artificial Sequence
  Target HLA Sequence complement
gtaacttcttccttccctatt

SEQ ID NO: 8516 - DNA, 21 bp, Artificial Sequence
  Target HLA Sequence complement
catgtgcagcatgagggtttg

SEQ ID NO: 8517 - DNA, 21 bp, Artificial Sequence
  Target HLA Sequence complement
ttgttcctgcccttccctttg

SEQ ID NO: 8518 - DNA, 21 bp, Artificial Sequence
  Target HLA Sequence complement
acccagttctcactcccattg

SEQ ID NO: 8519 - DNA, 21 bp, Artificial Sequence
  Target HLA Sequence complement
gggtttccagagaagccaatc

SEQ ID NO: 8520 - DNA, 21 bp, Artificial Sequence
  Target HLA Sequence complement
ttctccctctcccaacctatg

SEQ ID NO: 8521 - DNA, 21 bp, Artificial Sequence
  Target HLA Sequence complement
gtctctcacagcttgtaaagt

SEQ ID NO: 8522 - DNA, 21 bp, Artificial Sequence
  Target HLA Sequence complement
tgtgtctctcacagcttgtaa

SEQ ID NO: 8523 - DNA, 21 bp, Artificial Sequence
  Target HLA Sequence complement
gaggaagagctcagatagaaa

SEQ ID NO: 8524 - DNA, 21 bp, Artificial Sequence
  Target HLA Sequence complement
tgaagaaccctgactttgttt

SEQ ID NO: 8525 - DNA, 21 bp, Artificial Sequence
  Target HLA Sequence complement
ttgaagaaccctgactttgtt

SEQ ID NO: 8526 - DNA, 21 bp, Artificial Sequence
  Target HLA Sequence complement
gtgttcgtgtaggcataatgt

SEQ ID NO: 8527 - DNA, 21 bp, Artificial Sequence
  Target HLA Sequence complement
tggtgcactgagctgtaactt

SEQ ID NO: 8528 - DNA, 21 bp, Artificial Sequence
  Target HLA Sequence complement
ctccctctcccaacctatgta

SEQ ID NO: 8529 - DNA, 21 bp, Artificial Sequence
  Target HLA Sequence complement
aggaggaagagctcagataga

SEQ ID NO: 8530 - DNA, 21 bp, Artificial Sequence
  Target HLA Sequence complement
acctatgtagggtccttcttc

SEQ ID NO: 8531 - DNA, 21 bp, Artificial Sequence
  Target HLA Sequence complement
gggtccttcttcctggatact

SEQ ID NO: 8532 - DNA, 21 bp, Artificial Sequence
  Target HLA Sequence complement
ggtccttcttcctggatactc

SEQ ID NO: 8533 - DNA, 21 bp, Artificial Sequence
  Target HLA Sequence complement
gtccttcttcctggatactca

SEQ ID NO: 8534 - DNA, 21 bp, Artificial Sequence
  Target HLA Sequence complement
aagccaatcagtgtcgtcgcg

SEQ ID NO: 8535 - DNA, 21 bp, Artificial Sequence
  Target HLA Sequence complement
aagaggacctgcgctcttgga

SEQ ID NO: 8536 - DNA, 21 bp, Artificial Sequence
  Target HLA Sequence complement
aagtgtgagacagctgccttg

SEQ ID NO: 8537 - DNA, 21 bp, Artificial Sequence
  Target HLA Sequence complement
aaggcacctgcatgtgtctgt

SEQ ID NO: 8538 - DNA, 21 bp, Artificial Sequence
  Target HLA Sequence complement
aatcatctttcctgttccaga

SEQ ID NO: 8539 - DNA, 21 bp, Artificial Sequence
  Target HLA Sequence complement
aaaggcacctgcatgtgtctg

SEQ ID NO: 8540 - DNA, 21 bp, Artificial Sequence
  Target HLA Sequence complement
aaagaggacctgcgctcttgg

SEQ ID NO: 8541 - DNA, 21 bp, Artificial Sequence
  Target HLA Sequence complement
aaacgcatatgactcaccacg

SEQ ID NO: 8542 - DNA, 19 bp, Artificial Sequence
  Target HLA Sequence complement
ggaagagctcagatagaaa

SEQ ID NO: 8543 - DNA, 19 bp, Artificial Sequence
  Target HLA Sequence complement
gggagacacggaaagtgaa

SEQ ID NO: 8544 - DNA, 21 bp, Artificial Sequence
  Target HLA Sequence complement
cacctgccatgtgcagcatga

SEQ ID NO: 8545 - DNA, 21 bp, Artificial Sequence
  Target HLA Sequence complement
ggagatcacactgacctggca

SEQ ID NO: 8546 - DNA, 20 bp, Artificial Sequence
  Target HLA Sequence complement
ggattacatcgccctgaaag

SEQ ID NO: 8547 - DNA, 20 bp, Artificial Sequence
  Target HLA Sequence complement
gcaggagggtccggagtatt

SEQ ID NO: 8548 - DNA, 20 bp, Artificial Sequence
  Target HLA Sequence complement
ggacggggagacacggaaag

SEQ ID NO: 8549 - DNA, 19 bp, Artificial Sequence
  Target HLA Sequence complement
gaaagtgaaggcccactca

SEQ ID NO: 8550 - DNA, 20 bp, Artificial Sequence
  Target HLA Sequence complement
gatacctggagaacgggaag

SEQ ID NO: 8551 - DNA, 20 bp, Artificial Sequence
  Target HLA Sequence complement
gctgtggtggtgccttctgg

SEQ ID NO: 8552 - DNA, 20 bp, Artificial Sequence
  Target HLA Sequence complement
gctactacaaccagagcgag

SEQ ID NO: 8553 - DNA, 19 bp, Artificial Sequence
  Target HLA Sequence complement
gtggctccgcagatacctg

SEQ ID NO: 8554 - DNA, 19 bp, Artificial Sequence
  Target HLA Sequence complement
gccaatcagtgtcgtcgcg

SEQ ID NO: 8555 - DNA, 19 bp, Artificial Sequence
  Target HLA Sequence complement
gaggacctgcgctcttgga

SEQ ID NO: 8556 - DNA, 19 bp, Artificial Sequence
  Target HLA Sequence complement
gtgtgagacagctgccttg

SEQ ID NO: 8557 - DNA, 19 bp, Artificial Sequence
  Target HLA Sequence complement
ggcacctgcatgtgtctgt

SEQ ID NO: 8558 - DNA, 19 bp, Artificial Sequence
  Target HLA Sequence complement
tcatctttcctgttccaga

SEQ ID NO: 8559 - DNA, 19 bp, Artificial Sequence
  Target HLA Sequence complement
aggcacctgcatgtgtctg

SEQ ID NO: 8560 - DNA, 19 bp, Artificial Sequence
  Target HLA Sequence complement
agaggacctgcgctcttgg

SEQ ID NO: 8561 - DNA, 19 bp, Artificial Sequence
  Target HLA Sequence complement
acgcatatgactcaccacg

SEQ ID NO: 8562 - DNA, 21 bp, Artificial Sequence
  Target HLA Sequence complement
cttctggacaggagcagagat

SEQ ID NO: 8563 - DNA, 21 bp, Artificial Sequence
  Target HLA Sequence complement
gggatggaaccttccagaagt

SEQ ID NO: 8564 - DNA, 21 bp, Artificial Sequence
  Target HLA Sequence complement
tggacaggagcagagatacac

SEQ ID NO: 8565 - DNA, 21 bp, Artificial Sequence
  Target HLA Sequence complement
acgctgtctctgaccatgaag

SEQ ID NO: 8566 - DNA, 21 bp, Artificial Sequence
  Target HLA Sequence complement
ttctggacaggagcagagata

SEQ ID NO: 8567 - DNA, 21 bp, Artificial Sequence
  Target HLA Sequence complement
ggttctctttggagctgtgat

SEQ ID NO: 8568 - DNA, 21 bp, Artificial Sequence
  Target HLA Sequence complement
cattgctggcctggttctctt

SEQ ID NO: 8569 - DNA, 21 bp, Artificial Sequence
  Target HLA Sequence complement
ttctctttggagctgtgatca

SEQ ID NO: 8570 - DNA, 21 bp, Artificial Sequence
  Target HLA Sequence complement
attgctggcctggttctcttt

SEQ ID NO: 8571 - DNA, 21 bp, Artificial Sequence
  Target HLA Sequence complement
atgtgtctctcacagcttgta

SEQ ID NO: 8572 - DNA, 21 bp, Artificial Sequence
  Target HLA Sequence complement
ccctgactttgtttctgcaaa

SEQ ID NO: 8573 - DNA, 21 bp, Artificial Sequence
  Target HLA Sequence complement
gcacctgcatgtgtctgtgtt

SEQ ID NO: 8574 - DNA, 21 bp, Artificial Sequence
  Target HLA Sequence complement
gcccttccctttgtgacttga

SEQ ID NO: 8575 - DNA, 21 bp, Artificial Sequence
  Target HLA Sequence complement
agaaccctgactttgtttctg

SEQ ID NO: 8576 - DNA, 21 bp, Artificial Sequence
  Target HLA Sequence complement
tccatctctgtctcaacttca

SEQ ID NO: 8577 - DNA, 21 bp, Artificial Sequence
  Target HLA Sequence complement
gtgcactgagctgtaacttct

SEQ ID NO: 8578 - DNA, 21 bp, Artificial Sequence
  Target HLA Sequence complement
ctgcccttccctttgtgactt

SEQ ID NO: 8579 - DNA, 21 bp, Artificial Sequence
  Target HLA Sequence complement
tgacttgaagaaccctgactt

SEQ ID NO: 8580 - DNA, 21 bp, Artificial Sequence
  Target HLA Sequence complement
gtgtctccatctctgtctcaa

SEQ ID NO: 8581 - DNA, 21 bp, Artificial Sequence
  Target HLA Sequence complement
tgcactgagctgtaacttctt

SEQ ID NO: 8582 - DNA, 21 bp, Artificial Sequence
  Target HLA Sequence complement
tgttcctgcccttccctttgt

SEQ ID NO: 8583 - DNA, 21 bp, Artificial Sequence
  Target HLA Sequence complement
gacttgaagaaccctgacttt

SEQ ID NO: 8584 - DNA, 21 bp, Artificial Sequence
  Target HLA Sequence complement
tctctcacagcttgtaaagtg

SEQ ID NO: 8585 - DNA, 21 bp, Artificial Sequence
  Target HLA Sequence complement
ggaggaggaagagctcagata

SEQ ID NO: 8586 - DNA, 21 bp, Artificial Sequence
  Target HLA Sequence complement
ggactgagaggcaagagttgt

SEQ ID NO: 8587 - DNA, 21 bp, Artificial Sequence
  Target HLA Sequence complement
actgagaggcaagagttgttc

SEQ ID NO: 8588 - DNA, 21 bp, Artificial Sequence
  Target HLA Sequence complement
tgggactgagaggcaagagtt

SEQ ID NO: 8589 - DNA, 21 bp, Artificial Sequence
  Target HLA Sequence complement
gactgagaggcaagagttgtt

SEQ ID NO: 8590 - DNA, 21 bp, Artificial Sequence
  Target HLA Sequence complement
cccttccctttgtgacttgaa

SEQ ID NO: 8591 - DNA, 21 bp, Artificial Sequence
  Target HLA Sequence complement
gtttccagagaagccaatcag

SEQ ID NO: 8592 - DNA, 21 bp, Artificial Sequence
  Target HLA Sequence complement
ggtttccagagaagccaatca

SEQ ID NO: 8593 - DNA, 21 bp, Artificial Sequence
  Target HLA Sequence complement
ccttccctttgtgacttgaag

SEQ ID NO: 8594 - DNA, 21 bp, Artificial Sequence
  Target HLA Sequence complement
tccctttgtgacttgaagaac

SEQ ID NO: 8595 - DNA, 21 bp, Artificial Sequence
  Target HLA Sequence complement
ttccctttgtgacttgaagaa

SEQ ID NO: 8596 - DNA, 21 bp, Artificial Sequence
  Target HLA Sequence complement
cttccctttgtgacttgaaga

SEQ ID NO: 8597 - DNA, 21 bp, Artificial Sequence
  Target HLA Sequence complement
cttgaagaaccctgactttgt

SEQ ID NO: 8598 - DNA, 21 bp, Artificial Sequence
  Target HLA Sequence complement
gcactgagctgtaacttcttc

SEQ ID NO: 8599 - DNA, 21 bp, Artificial Sequence
  Target HLA Sequence complement
tgttcgtgtaggcataatgtg

SEQ ID NO: 8600 - DNA, 21 bp, Artificial Sequence
  Target HLA Sequence complement
ccatctctgtctcaacttcat

SEQ ID NO: 8601 - DNA, 21 bp, Artificial Sequence
  Target HLA Sequence complement
tcatggtgcactgagctgtaa

SEQ ID NO: 8602 - DNA, 21 bp, Artificial Sequence
  Target HLA Sequence complement
gtctccatctctgtctcaact

SEQ ID NO: 8603 - DNA, 21 bp, Artificial Sequence
  Target HLA Sequence complement
tctccatctctgtctcaactt

SEQ ID NO: 8604 - DNA, 21 bp, Artificial Sequence
  Target HLA Sequence complement
ctccatctctgtctcaacttc

SEQ ID NO: 8605 - DNA, 21 bp, Artificial Sequence
  Target HLA Sequence complement
atggtgcactgagctgtaact

SEQ ID NO: 8606 - DNA, 21 bp, Artificial Sequence
  Target HLA Sequence complement
ggtgcactgagctgtaacttc

SEQ ID NO: 8607 - DNA, 21 bp, Artificial Sequence
  Target HLA Sequence complement
tagggtccttcttcctggata

SEQ ID NO: 8608 - DNA, 21 bp, Artificial Sequence
  Target HLA Sequence complement
tctccctctcccaacctatgt

SEQ ID NO: 8609 - DNA, 21 bp, Artificial Sequence
  Target HLA Sequence complement
tccctctcccaacctatgtag

SEQ ID NO: 8610 - DNA, 21 bp, Artificial Sequence
  Target HLA Sequence complement
tttctccctctcccaacctat

SEQ ID NO: 8611 - DNA, 21 bp, Artificial Sequence
  Target HLA Sequence complement
agcaggagggtccggagtatt

SEQ ID NO: 8612 - DNA, 21 bp, Artificial Sequence
  Target HLA Sequence complement
gctctgatgtgtctctcacag

SEQ ID NO: 8613 - DNA, 21 bp, Artificial Sequence
  Target HLA Sequence complement
caaggattacatcgccctgaa

SEQ ID NO: 8614 - DNA, 21 bp, Artificial Sequence
  Target HLA Sequence complement
agcttgtaaagtgtgagacag

SEQ ID NO: 8615 - DNA, 21 bp, Artificial Sequence
  Target HLA Sequence complement
acgacggcaaggattacatcg

SEQ ID NO: 8616 - DNA, 21 bp, Artificial Sequence
  Target HLA Sequence complement
tcagaccaccaagcacaagtg

SEQ ID NO: 8617 - DNA, 21 bp, Artificial Sequence
  Target HLA Sequence complement
agctcagaccaccaagcacaa

SEQ ID NO: 8618 - DNA, 21 bp, Artificial Sequence
  Target HLA Sequence complement
cagagatacacctgccatgtg

SEQ ID NO: 8619 - DNA, 21 bp, Artificial Sequence
  Target HLA Sequence complement
atgaggtatttcttcacatcc

SEQ ID NO: 8620 - DNA, 21 bp, Artificial Sequence
  Target HLA Sequence complement
ctccatgaggtatttcttcac

SEQ ID NO: 8621 - DNA, 21 bp, Artificial Sequence
  Target HLA Sequence complement
cactgagctgtaacttcttcc

SEQ ID NO: 8622 - DNA, 21 bp, Artificial Sequence
  Target HLA Sequence complement
cctatgtagggtccttcttcc

SEQ ID NO: 8623 - DNA, 21 bp, Artificial Sequence
  Target HLA Sequence complement
catgaggtatttcttcacatc

SEQ ID NO: 8624 - DNA, 21 bp, Artificial Sequence
  Target HLA Sequence complement
catctttcctgttccagagag

SEQ ID NO: 8625 - DNA, 21 bp, Artificial Sequence
  Target HLA Sequence complement
tcaacttcatggtgcactgag

SEQ ID NO: 8626 - DNA, 21 bp, Artificial Sequence
  Target HLA Sequence complement
ggatggaaccttccagaagtg

SEQ ID NO: 8627 - DNA, 21 bp, Artificial Sequence
  Target HLA Sequence complement
gcagagatacacctgccatgt

SEQ ID NO: 8628 - DNA, 21 bp, Artificial Sequence
  Target HLA Sequence complement
ccatgtgcagcatgagggttt

SEQ ID NO: 8629 - DNA, 21 bp, Artificial Sequence
  Target HLA Sequence complement
tatgactcaccacgctgtctc

SEQ ID NO: 8630 - DNA, 21 bp, Artificial Sequence
  Target HLA Sequence complement
aggtgtctccatctctgtctc

SEQ ID NO: 8631 - DNA, 21 bp, Artificial Sequence
  Target HLA Sequence complement
atgtgcagcatgagggtttgc

SEQ ID NO: 8632 - DNA, 21 bp, Artificial Sequence
  Target HLA Sequence complement
tgtgatgtggaggaggaagag

SEQ ID NO: 8633 - DNA, 21 bp, Artificial Sequence
  Target HLA Sequence complement
catcattgctggcctggttct

SEQ ID NO: 8634 - DNA, 21 bp, Artificial Sequence
  Target HLA Sequence complement
atcattgctggcctggttctc

SEQ ID NO: 8635 - DNA, 21 bp, Artificial Sequence
  Target HLA Sequence complement
ttcatggtgcactgagctgta

SEQ ID NO: 8636 - DNA, 21 bp, Artificial Sequence
  Target HLA Sequence complement
ctgtgatgtggaggaggaaga

SEQ ID NO: 8637 - DNA, 21 bp, Artificial Sequence
  Target HLA Sequence complement
tctctttggagctgtgatcac

SEQ ID NO: 8638 - DNA, 21 bp, Artificial Sequence
  Target HLA Sequence complement
gttctctttggagctgtgatc

SEQ ID NO: 8639 - DNA, 21 bp, Artificial Sequence
  Target HLA Sequence complement
tctttggagctgtgatcactg

SEQ ID NO: 8640 - DNA, 21 bp, Artificial Sequence
  Target HLA Sequence complement
tgatgtgtctctcacagcttg

SEQ ID NO: 8641 - DNA, 21 bp, Artificial Sequence
  Target HLA Sequence complement
gatgtgtctctcacagcttgt

SEQ ID NO: 8642 - DNA, 21 bp, Artificial Sequence
  Target HLA Sequence complement
acagcttgtaaagtgtgagac

SEQ ID NO: 8643 - DNA, 21 bp, Artificial Sequence
  Target HLA Sequence complement
agtgtgagacagctgccttgt

SEQ ID NO: 8644 - DNA, 21 bp, Artificial Sequence
  Target HLA Sequence complement
atctctgtctcaacttcatgg

SEQ ID NO: 8645 - DNA, 21 bp, Artificial Sequence
  Target HLA Sequence complement
catgtccaccatgaccctctt

SEQ ID NO: 8646 - DNA, 21 bp, Artificial Sequence
  Target HLA Sequence complement
cccaatcatctttcctgttcc

SEQ ID NO: 8647 - DNA, 21 bp, Artificial Sequence
  Target HLA Sequence complement
gttgttcctgcccttcccttt

SEQ ID NO: 8648 - DNA, 21 bp, Artificial Sequence
  Target HLA Sequence complement
atgtccaccatgaccctcttc

SEQ ID NO: 8649 - DNA, 21 bp, Artificial Sequence
  Target HLA Sequence complement
tctcacagcttgtaaagtgtg

SEQ ID NO: 8650 - DNA, 21 bp, Artificial Sequence
  Target HLA Sequence complement
ctgagaggcaagagttgttcc

SEQ ID NO: 8651 - DNA, 21 bp, Artificial Sequence
  Target HLA Sequence complement
tgcccttccctttgtgacttg

SEQ ID NO: 8652 - DNA, 21 bp, Artificial Sequence
  Target HLA Sequence complement
gacccagttctcactcccatt

SEQ ID NO: 8653 - DNA, 21 bp, Artificial Sequence
  Target HLA Sequence complement
cacctgcatgtgtctgtgttc

SEQ ID NO: 8654 - DNA, 21 bp, Artificial Sequence
  Target HLA Sequence complement
tgaggtgtctccatctctgtc

SEQ ID NO: 8655 - DNA, 21 bp, Artificial Sequence
  Target HLA Sequence complement
tgtctccatctctgtctcaac

SEQ ID NO: 8656 - DNA, 21 bp, Artificial Sequence
  Target HLA Sequence complement
ccaacctatgtagggtccttc

SEQ ID NO: 8657 - DNA, 21 bp, Artificial Sequence
  Target HLA Sequence complement
caacctatgtagggtccttct

SEQ ID NO: 8658 - DNA, 21 bp, Artificial Sequence
  Target HLA Sequence complement
ttccagagaagccaatcagtg

SEQ ID NO: 8659 - DNA, 21 bp, Artificial Sequence
  Target HLA Sequence complement
ccagagaagccaatcagtgtc

SEQ ID NO: 8660 - DNA, 21 bp, Artificial Sequence
  Target HLA Sequence complement
cgggtttccagagaagccaat

SEQ ID NO: 8661 - DNA, 21 bp, Artificial Sequence
  Target HLA Sequence complement
ccctttgtgacttgaagaacc

SEQ ID NO: 8662 - DNA, 21 bp, Artificial Sequence
  Target HLA Sequence complement
tctgcaaaggcacctgcatgt

SEQ ID NO: 8663 - DNA, 21 bp, Artificial Sequence
  Target HLA Sequence complement
ttcgtgtaggcataatgtgag

SEQ ID NO: 8664 - DNA, 21 bp, Artificial Sequence
  Target HLA Sequence complement
ttctgcaaaggcacctgcatg

SEQ ID NO: 8665 - DNA, 21 bp, Artificial Sequence
  Target HLA Sequence complement
acctgcatgtgtctgtgttcg

SEQ ID NO: 8666 - DNA, 21 bp, Artificial Sequence
  Target HLA Sequence complement
gtctgtgttcgtgtaggcata

SEQ ID NO: 8667 - DNA, 21 bp, Artificial Sequence
  Target HLA Sequence complement
gcatgtgtctgtgttcgtgta

SEQ ID NO: 8668 - DNA, 21 bp, Artificial Sequence
  Target HLA Sequence complement
catgtgtctgtgttcgtgtag

SEQ ID NO: 8669 - DNA, 21 bp, Artificial Sequence
  Target HLA Sequence complement
atgtgtctgtgttcgtgtagg

SEQ ID NO: 8670 - DNA, 21 bp, Artificial Sequence
  Target HLA Sequence complement
tgtaacttcttccttccctat

SEQ ID NO: 8671 - DNA, 21 bp, Artificial Sequence
  Target HLA Sequence complement
tgagctgtaacttcttccttc

SEQ ID NO: 8672 - DNA, 21 bp, Artificial Sequence
  Target HLA Sequence complement
tccttcttcctggatactcac

SEQ ID NO: 8673 - DNA, 21 bp, Artificial Sequence
  Target HLA Sequence complement
gcctacgacggcaaggattac

SEQ ID NO: 8674 - DNA, 21 bp, Artificial Sequence
  Target HLA Sequence complement
cgcctacgacggcaaggatta

SEQ ID NO: 8675 - DNA, 21 bp, Artificial Sequence
  Target HLA Sequence complement
tcattgctggcctggttctct

SEQ ID NO: 8676 - DNA, 21 bp, Artificial Sequence
  Target HLA Sequence complement
ctgagctgtaacttcttcctt

SEQ ID NO: 8677 - DNA, 21 bp, Artificial Sequence
  Target HLA Sequence complement
ctctcacagcttgtaaagtgt

SEQ ID NO: 8678 - DNA, 21 bp, Artificial Sequence
  Target HLA Sequence complement
tgcaaaggcacctgcatgtgt

SEQ ID NO: 8679 - DNA, 21 bp, Artificial Sequence
  Target HLA Sequence complement
tccatgaggtatttcttcaca

SEQ ID NO: 8680 - DNA, 21 bp, Artificial Sequence
  Target HLA Sequence complement
ttctaccctgcggagatcaca

SEQ ID NO: 8681 - DNA, 21 bp, Artificial Sequence
  Target HLA Sequence complement
ctctttggagctgtgatcact

SEQ ID NO: 8682 - DNA, 21 bp, Artificial Sequence
  Target HLA Sequence complement
gttcgtgtaggcataatgtga

SEQ ID NO: 8683 - DNA, 21 bp, Artificial Sequence
  Target HLA Sequence complement
tgtgagacagctgccttgtgt

SEQ ID NO: 8684 - DNA, 21 bp, Artificial Sequence
  Target HLA Sequence complement
ttcctgcccttccctttgtga

SEQ ID NO: 8685 - DNA, 21 bp, Artificial Sequence
  Target HLA Sequence complement
tttccagagaagccaatcagt

SEQ ID NO: 8686 - DNA, 21 bp, Artificial Sequence
  Target HLA Sequence complement
ttctcacaccgtccagaggat

SEQ ID NO: 8687 - DNA, 21 bp, Artificial Sequence
  Target HLA Sequence complement
ggctctgatgtgtctctcaca

SEQ ID NO: 8688 - DNA, 21 bp, Artificial Sequence
  Target HLA Sequence complement
tcatctttcctgttccagaga

SEQ ID NO: 8689 - DNA, 21 bp, Artificial Sequence
  Target HLA Sequence complement
gtagggtccttcttcctggat

SEQ ID NO: 8690 - DNA, 21 bp, Artificial Sequence
  Target HLA Sequence complement
gaaagtgaaggcccactcaca

SEQ ID NO: 8691 - DNA, 21 bp, Artificial Sequence
  Target HLA Sequence complement
atacctggagaacgggaagga

SEQ ID NO: 8692 - DNA, 21 bp, Artificial Sequence
  Target HLA Sequence complement
tgcatgtgtctgtgttcgtgt

SEQ ID NO: 8693 - DNA, 21 bp, Artificial Sequence
  Target HLA Sequence complement
ctgcatgtgtctgtgttcgtg

SEQ ID NO: 8694 - DNA, 21 bp, Artificial Sequence
  Target HLA Sequence complement
cttgtaaagtgtgagacagct

SEQ ID NO: 8695 - DNA, 21 bp, Artificial Sequence
  Target HLA Sequence complement
tatgtagggtccttcttcctg

SEQ ID NO: 8696 - DNA, 21 bp, Artificial Sequence
  Target HLA Sequence complement
ttacatcgccctgaaagagga

SEQ ID NO: 8697 - DNA, 21 bp, Artificial Sequence
  Target HLA Sequence complement
attacatcgccctgaaagagg

SEQ ID NO: 8698 - DNA, 21 bp, Artificial Sequence
  Target HLA Sequence complement
agagatacacctgccatgtgc

SEQ ID NO: 8699 - DNA, 21 bp, Artificial Sequence
  Target HLA Sequence complement
gacaggagcagagatacacct

SEQ ID NO: 8700 - DNA, 21 bp, Artificial Sequence
  Target HLA Sequence complement
tgctgtgatgtggaggaggaa

SEQ ID NO: 8701 - DNA, 21 bp, Artificial Sequence
  Target HLA Sequence complement
tacacctgccatgtgcagcat

SEQ ID NO: 8702 - DNA, 21 bp, Artificial Sequence
  Target HLA Sequence complement
atgtggaggaggaagagctca

SEQ ID NO: 8703 - DNA, 21 bp, Artificial Sequence
  Target HLA Sequence complement
gatggaaccttccagaagtgg

SEQ ID NO: 8704 - DNA, 21 bp, Artificial Sequence
  Target HLA Sequence complement
gagatacacctgccatgtgca

SEQ ID NO: 8705 - DNA, 21 bp, Artificial Sequence
  Target HLA Sequence complement
attgggtgtcgggtttccaga

SEQ ID NO: 8706 - DNA, 21 bp, Artificial Sequence
  Target HLA Sequence complement
tgtgatcactggagctgtggt

SEQ ID NO: 8707 - DNA, 21 bp, Artificial Sequence
  Target HLA Sequence complement
atgactcaccacgctgtctct

SEQ ID NO: 8708 - DNA, 21 bp, Artificial Sequence
  Target HLA Sequence complement
ggtgtctccatctctgtctca

SEQ ID NO: 8709 - DNA, 21 bp, Artificial Sequence
  Target HLA Sequence complement
tggttctctttggagctgtga

SEQ ID NO: 8710 - DNA, 21 bp, Artificial Sequence
  Target HLA Sequence complement
tcgggtttccagagaagccaa

SEQ ID NO: 8711 - DNA, 21 bp, Artificial Sequence
  Target HLA Sequence complement
tttctgcaaaggcacctgcat

SEQ ID NO: 8712 - DNA, 21 bp, Artificial Sequence
  Target HLA Sequence complement
ctgaggtgtctccatctctgt

SEQ ID NO: 8713 - DNA, 21 bp, Artificial Sequence
  Target HLA Sequence complement
gagcagagatacacctgccat

SEQ ID NO: 8714 - DNA, 21 bp, Artificial Sequence
  Target HLA Sequence complement
atatgactcaccacgctgtct

SEQ ID NO: 8715 - DNA, 21 bp, Artificial Sequence
  Target HLA Sequence complement
gtgacttgaagaaccctgact

SEQ ID NO: 8716 - DNA, 21 bp, Artificial Sequence
  Target HLA Sequence complement
actgagctgtaacttcttcct

SEQ ID NO: 8717 - DNA, 21 bp, Artificial Sequence
  Target HLA Sequence complement
ctatgtagggtccttcttcct

SEQ ID NO: 8718 - DNA, 21 bp, Artificial Sequence
  Target HLA Sequence complement
tctctgtctcaacttcatggt

SEQ ID NO: 8719 - DNA, 21 bp, Artificial Sequence
  Target HLA Sequence complement
agctgtgatcactggagctgt

SEQ ID NO: 8720 - DNA, 21 bp, Artificial Sequence
  Target HLA Sequence complement
cctggttctctttggagctgt

SEQ ID NO: 8721 - DNA, 21 bp, Artificial Sequence
  Target HLA Sequence complement
cttcatggtgcactgagctgt

SEQ ID NO: 8722 - DNA, 21 bp, Artificial Sequence
  Target HLA Sequence complement
tgatgtggaggaggaagagct

SEQ ID NO: 8723 - DNA, 21 bp, Artificial Sequence
  Target HLA Sequence complement
tttggagctgtgatcactgga

SEQ ID NO: 8724 - DNA, 21 bp, Artificial Sequence
  Target HLA Sequence complement
tctgatgtgtctctcacagct

SEQ ID NO: 8725 - DNA, 21 bp, Artificial Sequence
  Target HLA Sequence complement
ctgatgtgtctctcacagctt

SEQ ID NO: 8726 - DNA, 21 bp, Artificial Sequence
  Target HLA Sequence complement
caaaggcacctgcatgtgtct

SEQ ID NO: 8727 - DNA, 21 bp, Artificial Sequence
  Target HLA Sequence complement
agggctctgatgtgtctctca

SEQ ID NO: 8728 - DNA, 21 bp, Artificial Sequence
  Target HLA Sequence complement
tctttcctgttccagagaggt

SEQ ID NO: 8729 - DNA, 21 bp, Artificial Sequence
  Target HLA Sequence complement
gaaccctgactttgtttctgc

SEQ ID NO: 8730 - DNA, 21 bp, Artificial Sequence
  Target HLA Sequence complement
gagaggcaagagttgttcctg

SEQ ID NO: 8731 - DNA, 21 bp, Artificial Sequence
  Target HLA Sequence complement
caatcatctttcctgttccag

SEQ ID NO: 8732 - DNA, 21 bp, Artificial Sequence
  Target HLA Sequence complement
cccaacctatgtagggtcctt

SEQ ID NO: 8733 - DNA, 21 bp, Artificial Sequence
  Target HLA Sequence complement
tgagaggcaagagttgttcct

SEQ ID NO: 8734 - DNA, 21 bp, Artificial Sequence
  Target HLA Sequence complement
agttgttcctgcccttccctt

SEQ ID NO: 8735 - DNA, 21 bp, Artificial Sequence
  Target HLA Sequence complement
accctgactttgtttctgcaa

SEQ ID NO: 8736 - DNA, 21 bp, Artificial Sequence
  Target HLA Sequence complement
ccaatcatctttcctgttcca

SEQ ID NO: 8737 - DNA, 21 bp, Artificial Sequence
  Target HLA Sequence complement
ctgtaacttcttccttcccta

SEQ ID NO: 8738 - DNA, 21 bp, Artificial Sequence
  Target HLA Sequence complement
tactctcaggctgcaagcagt

SEQ ID NO: 8739 - DNA, 21 bp, Artificial Sequence
  Target HLA Sequence complement
cagcttgtaaagtgtgagaca

SEQ ID NO: 8740 - DNA, 21 bp, Artificial Sequence
  Target HLA Sequence complement
cacagcttgtaaagtgtgaga

SEQ ID NO: 8741 - DNA, 21 bp, Artificial Sequence
  Target HLA Sequence complement
ttgtgtgggactgagaggcaa

SEQ ID NO: 8742 - DNA, 21 bp, Artificial Sequence
  Target HLA Sequence complement
tccagagaagccaatcagtgt

SEQ ID NO: 8743 - DNA, 21 bp, Artificial Sequence
  Target HLA Sequence complement
agagaagccaatcagtgtcgt

SEQ ID NO: 8744 - DNA, 21 bp, Artificial Sequence
  Target HLA Sequence complement
cgtgtaggcataatgtgagga

SEQ ID NO: 8745 - DNA, 21 bp, Artificial Sequence
  Target HLA Sequence complement
cctgcatgtgtctgtgttcgt

SEQ ID NO: 8746 - DNA, 21 bp, Artificial Sequence
  Target HLA Sequence complement
tgtctgtgttcgtgtaggcat

SEQ ID NO: 8747 - DNA, 21 bp, Artificial Sequence
  Target HLA Sequence complement
ctcaacttcatggtgcactga

SEQ ID NO: 8748 - DNA, 21 bp, Artificial Sequence
  Target HLA Sequence complement
ctctgtctcaacttcatggtg

SEQ ID NO: 8749 - DNA, 21 bp, Artificial Sequence
  Target HLA Sequence complement
gtctcaacttcatggtgcact

SEQ ID NO: 8750 - DNA, 21 bp, Artificial Sequence
  Target HLA Sequence complement
gaggtgtctccatctctgtct

SEQ ID NO: 8751 - DNA, 21 bp, Artificial Sequence
  Target HLA Sequence complement
cttcttcctggatactcacga

SEQ ID NO: 8752 - DNA, 21 bp, Artificial Sequence
  Target HLA Sequence complement
agatacctggagaacgggaag

SEQ ID NO: 8753 - DNA, 21 bp, Artificial Sequence
  Target HLA Sequence complement
gtatttcttcacatccgtgtc

SEQ ID NO: 8754 - DNA, 21 bp, Artificial Sequence
  Target HLA Sequence complement
ttctcactcccattgggtgtc

SEQ ID NO: 8755 - DNA, 18 bp, Artificial Sequence
  Target HLA Sequence complement
cgaaggcggtgtatggat

SEQ ID NO: 8756 - DNA, 18 bp, Artificial Sequence
  Target HLA Sequence complement
gaaggcggtgtatggatt

SEQ ID NO: 8757 - DNA, 18 bp, Artificial Sequence
  Target HLA Sequence complement
aaggcggtgtatggattg

SEQ ID NO: 8758 - DNA, 18 bp, Artificial Sequence
  Target HLA Sequence complement
aggcggtgtatggattgg

SEQ ID NO: 8759 - DNA, 18 bp, Artificial Sequence
  Target HLA Sequence complement
cccaactccgcagtttct

SEQ ID NO: 8760 - DNA, 18 bp, Artificial Sequence
  Target HLA Sequence complement
ccaactccgcagtttctt

SEQ ID NO: 8761 - DNA, 18 bp, Artificial Sequence
  Target HLA Sequence complement
caactccgcagtttcttt

SEQ ID NO: 8762 - DNA, 18 bp, Artificial Sequence
  Target HLA Sequence complement
tttctccctctcccaacc

SEQ ID NO: 8763 - DNA, 18 bp, Artificial Sequence
  Target HLA Sequence complement
ttctccctctcccaacct

SEQ ID NO: 8764 - DNA, 18 bp, Artificial Sequence
  Target HLA Sequence complement
tctccctctcccaaccta

SEQ ID NO: 8765 - DNA, 18 bp, Artificial Sequence
  Target HLA Sequence complement
ctccctctcccaacctat

SEQ ID NO: 8766 - DNA, 18 bp, Artificial Sequence
  Target HLA Sequence complement
tccctctcccaacctatg

SEQ ID NO: 8767 - DNA, 18 bp, Artificial Sequence
  Target HLA Sequence complement
ccctctcccaacctatgt

SEQ ID NO: 8768 - DNA, 18 bp, Artificial Sequence
  Target HLA Sequence complement
cctctcccaacctatgta

SEQ ID NO: 8769 - DNA, 18 bp, Artificial Sequence
  Target HLA Sequence complement
ctctcccaacctatgtag

SEQ ID NO: 8770 - DNA, 18 bp, Artificial Sequence
  Target HLA Sequence complement
tctcccaacctatgtagg

SEQ ID NO: 8771 - DNA, 18 bp, Artificial Sequence
  Target HLA Sequence complement
ctcccaacctatgtaggg

SEQ ID NO: 8772 - DNA, 18 bp, Artificial Sequence
  Target HLA Sequence complement
tcccaacctatgtagggt

SEQ ID NO: 8773 - DNA, 18 bp, Artificial Sequence
  Target HLA Sequence complement
cccaacctatgtagggtc

SEQ ID NO: 8774 - DNA, 18 bp, Artificial Sequence
  Target HLA Sequence complement
ccaacctatgtagggtcc

SEQ ID NO: 8775 - DNA, 18 bp, Artificial Sequence
  Target HLA Sequence complement
caacctatgtagggtcct

SEQ ID NO: 8776 - DNA, 18 bp, Artificial Sequence
  Target HLA Sequence complement
aacctatgtagggtcctt

SEQ ID NO: 8777 - DNA, 18 bp, Artificial Sequence
  Target HLA Sequence complement
acctatgtagggtccttc

SEQ ID NO: 8778 - DNA, 18 bp, Artificial Sequence
  Target HLA Sequence complement
cctatgtagggtccttct

SEQ ID NO: 8779 - DNA, 18 bp, Artificial Sequence
  Target HLA Sequence complement
ctatgtagggtccttctt

SEQ ID NO: 8780 - DNA, 18 bp, Artificial Sequence
  Target HLA Sequence complement
tatgtagggtccttcttc

SEQ ID NO: 8781 - DNA, 18 bp, Artificial Sequence
  Target HLA Sequence complement
atgtagggtccttcttcc

SEQ ID NO: 8782 - DNA, 18 bp, Artificial Sequence
  Target HLA Sequence complement
tgtagggtccttcttcct

SEQ ID NO: 8783 - DNA, 18 bp, Artificial Sequence
  Target HLA Sequence complement
gtagggtccttcttcctg

SEQ ID NO: 8784 - DNA, 18 bp, Artificial Sequence
  Target HLA Sequence complement
tagggtccttcttcctgg

SEQ ID NO: 8785 - DNA, 18 bp, Artificial Sequence
  Target HLA Sequence complement
agggtccttcttcctgga

SEQ ID NO: 8786 - DNA, 18 bp, Artificial Sequence
  Target HLA Sequence complement
gggtccttcttcctggat

SEQ ID NO: 8787 - DNA, 18 bp, Artificial Sequence
  Target HLA Sequence complement
ggtccttcttcctggata

SEQ ID NO: 8788 - DNA, 18 bp, Artificial Sequence
  Target HLA Sequence complement
gtccttcttcctggatac

SEQ ID NO: 8789 - DNA, 18 bp, Artificial Sequence
  Target HLA Sequence complement
tccttcttcctggatact

SEQ ID NO: 8790 - DNA, 18 bp, Artificial Sequence
  Target HLA Sequence complement
ccttcttcctggatactc

SEQ ID NO: 8791 - DNA, 18 bp, Artificial Sequence
  Target HLA Sequence complement
cttcttcctggatactca

SEQ ID NO: 8792 - DNA, 18 bp, Artificial Sequence
  Target HLA Sequence complement
ttcttcctggatactcac

SEQ ID NO: 8793 - DNA, 18 bp, Artificial Sequence
  Target HLA Sequence complement
tcttcctggatactcacg

SEQ ID NO: 8794 - DNA, 18 bp, Artificial Sequence
  Target HLA Sequence complement
cttcctggatactcacga

SEQ ID NO: 8795 - DNA, 18 bp, Artificial Sequence
  Target HLA Sequence complement
ttcctggatactcacgac

SEQ ID NO: 8796 - DNA, 18 bp, Artificial Sequence
  Target HLA Sequence complement
tcctggatactcacgacg

SEQ ID NO: 8797 - DNA, 18 bp, Artificial Sequence
  Target HLA Sequence complement
acccagttctcactccca

SEQ ID NO: 8798 - DNA, 18 bp, Artificial Sequence
  Target HLA Sequence complement
cccagttctcactcccat

SEQ ID NO: 8799 - DNA, 18 bp, Artificial Sequence
  Target HLA Sequence complement
ccagttctcactcccatt

SEQ ID NO: 8800 - DNA, 18 bp, Artificial Sequence
  Target HLA Sequence complement
cagttctcactcccattg

SEQ ID NO: 8801 - DNA, 18 bp, Artificial Sequence
  Target HLA Sequence complement
agttctcactcccattgg

SEQ ID NO: 8802 - DNA, 18 bp, Artificial Sequence
  Target HLA Sequence complement
gttctcactcccattggg

SEQ ID NO: 8803 - DNA, 18 bp, Artificial Sequence
  Target HLA Sequence complement
ttctcactcccattgggt

SEQ ID NO: 8804 - DNA, 18 bp, Artificial Sequence
  Target HLA Sequence complement
tctcactcccattgggtg

SEQ ID NO: 8805 - DNA, 18 bp, Artificial Sequence
  Target HLA Sequence complement
ctcactcccattgggtgt

SEQ ID NO: 8806 - DNA, 18 bp, Artificial Sequence
  Target HLA Sequence complement
tcactcccattgggtgtc

SEQ ID NO: 8807 - DNA, 18 bp, Artificial Sequence
  Target HLA Sequence complement
ccattgggtgtcgggttt

SEQ ID NO: 8808 - DNA, 18 bp, Artificial Sequence
  Target HLA Sequence complement
cattgggtgtcgggtttc

SEQ ID NO: 8809 - DNA, 18 bp, Artificial Sequence
  Target HLA Sequence complement
attgggtgtcgggtttcc

SEQ ID NO: 8810 - DNA, 18 bp, Artificial Sequence
  Target HLA Sequence complement
ttgggtgtcgggtttcca

SEQ ID NO: 8811 - DNA, 18 bp, Artificial Sequence
  Target HLA Sequence complement
gtgtcgggtttccagaga

SEQ ID NO: 8812 - DNA, 18 bp, Artificial Sequence
  Target HLA Sequence complement
tgtcgggtttccagagaa

SEQ ID NO: 8813 - DNA, 18 bp, Artificial Sequence
  Target HLA Sequence complement
gtcgggtttccagagaag

SEQ ID NO: 8814 - DNA, 18 bp, Artificial Sequence
  Target HLA Sequence complement
tcgggtttccagagaagc

SEQ ID NO: 8815 - DNA, 18 bp, Artificial Sequence
  Target HLA Sequence complement
gggtttccagagaagcca

SEQ ID NO: 8816 - DNA, 18 bp, Artificial Sequence
  Target HLA Sequence complement
ggtttccagagaagccaa

SEQ ID NO: 8817 - DNA, 18 bp, Artificial Sequence
  Target HLA Sequence complement
gtttccagagaagccaat

SEQ ID NO: 8818 - DNA, 18 bp, Artificial Sequence
  Target HLA Sequence complement
tttccagagaagccaatc

SEQ ID NO: 8819 - DNA, 18 bp, Artificial Sequence
  Target HLA Sequence complement
ttccagagaagccaatca

SEQ ID NO: 8820 - DNA, 18 bp, Artificial Sequence
  Target HLA Sequence complement
tccagagaagccaatcag

SEQ ID NO: 8821 - DNA, 18 bp, Artificial Sequence
  Target HLA Sequence complement
ccagagaagccaatcagt

SEQ ID NO: 8822 - DNA, 18 bp, Artificial Sequence
  Target HLA Sequence complement
cagagaagccaatcagtg

SEQ ID NO: 8823 - DNA, 18 bp, Artificial Sequence
  Target HLA Sequence complement
agagaagccaatcagtgt

SEQ ID NO: 8824 - DNA, 18 bp, Artificial Sequence
  Target HLA Sequence complement
gagaagccaatcagtgtc

SEQ ID NO: 8825 - DNA, 18 bp, Artificial Sequence
  Target HLA Sequence complement
agaagccaatcagtgtcg

SEQ ID NO: 8826 - DNA, 18 bp, Artificial Sequence
  Target HLA Sequence complement
gaagccaatcagtgtcgt

SEQ ID NO: 8827 - DNA, 18 bp, Artificial Sequence
  Target HLA Sequence complement
aagccaatcagtgtcgtc

SEQ ID NO: 8828 - DNA, 18 bp, Artificial Sequence
  Target HLA Sequence complement
agccaatcagtgtcgtcg

SEQ ID NO: 8829 - DNA, 18 bp, Artificial Sequence
  Target HLA Sequence complement
aatcagtgtcgtcgcggt

SEQ ID NO: 8830 - DNA, 18 bp, Artificial Sequence
  Target HLA Sequence complement
cggtcgcggttctaaagt

SEQ ID NO: 8831 - DNA, 18 bp, Artificial Sequence
  Target HLA Sequence complement
ggtcgcggttctaaagtc

SEQ ID NO: 8832 - DNA, 18 bp, Artificial Sequence
  Target HLA Sequence complement
gtcgcggttctaaagtcc

SEQ ID NO: 8833 - DNA, 18 bp, Artificial Sequence
  Target HLA Sequence complement
tcgcggttctaaagtccg

SEQ ID NO: 8834 - DNA, 18 bp, Artificial Sequence
  Target HLA Sequence complement
gcggttctaaagtccgca

SEQ ID NO: 8835 - DNA, 18 bp, Artificial Sequence
  Target HLA Sequence complement
cggttctaaagtccgcac

SEQ ID NO: 8836 - DNA, 18 bp, Artificial Sequence
  Target HLA Sequence complement
ggttctaaagtccgcacg

SEQ ID NO: 8837 - DNA, 18 bp, Artificial Sequence
  Target HLA Sequence complement
gttctaaagtccgcacgc

SEQ ID NO: 8838 - DNA, 18 bp, Artificial Sequence
  Target HLA Sequence complement
ttctaaagtccgcacgca

SEQ ID NO: 8839 - DNA, 18 bp, Artificial Sequence
  Target HLA Sequence complement
tctaaagtccgcacgcac

SEQ ID NO: 8840 - DNA, 18 bp, Artificial Sequence
  Target HLA Sequence complement
caccgggactcagattct

SEQ ID NO: 8841 - DNA, 18 bp, Artificial Sequence
  Target HLA Sequence complement
accgggactcagattctc

SEQ ID NO: 8842 - DNA, 18 bp, Artificial Sequence
  Target HLA Sequence complement
aaccctcgtcctgctact

SEQ ID NO: 8843 - DNA, 18 bp, Artificial Sequence
  Target HLA Sequence complement
gctctcactccatgaggt

SEQ ID NO: 8844 - DNA, 18 bp, Artificial Sequence
  Target HLA Sequence complement
ctctcactccatgaggta

SEQ ID NO: 8845 - DNA, 18 bp, Artificial Sequence
  Target HLA Sequence complement
tctcactccatgaggtat

SEQ ID NO: 8846 - DNA, 18 bp, Artificial Sequence
  Target HLA Sequence complement
ctcactccatgaggtatt

SEQ ID NO: 8847 - DNA, 18 bp, Artificial Sequence
  Target HLA Sequence complement
tcactccatgaggtattt

SEQ ID NO: 8848 - DNA, 18 bp, Artificial Sequence
  Target HLA Sequence complement
cactccatgaggtatttc

SEQ ID NO: 8849 - DNA, 18 bp, Artificial Sequence
  Target HLA Sequence complement
actccatgaggtatttct

SEQ ID NO: 8850 - DNA, 18 bp, Artificial Sequence
  Target HLA Sequence complement
ctccatgaggtatttctt

SEQ ID NO: 8851 - DNA, 18 bp, Artificial Sequence
  Target HLA Sequence complement
tccatgaggtatttcttc

SEQ ID NO: 8852 - DNA, 18 bp, Artificial Sequence
  Target HLA Sequence complement
ccatgaggtatttcttca

SEQ ID NO: 8853 - DNA, 18 bp, Artificial Sequence
  Target HLA Sequence complement
catgaggtatttcttcac

SEQ ID NO: 8854 - DNA, 18 bp, Artificial Sequence
  Target HLA Sequence complement
atgaggtatttcttcaca

SEQ ID NO: 8855 - DNA, 18 bp, Artificial Sequence
  Target HLA Sequence complement
tgaggtatttcttcacat

SEQ ID NO: 8856 - DNA, 18 bp, Artificial Sequence
  Target HLA Sequence complement
gaggtatttcttcacatc

SEQ ID NO: 8857 - DNA, 18 bp, Artificial Sequence
  Target HLA Sequence complement
aggtatttcttcacatcc

SEQ ID NO: 8858 - DNA, 18 bp, Artificial Sequence
  Target HLA Sequence complement
ggtatttcttcacatccg

SEQ ID NO: 8859 - DNA, 18 bp, Artificial Sequence
  Target HLA Sequence complement
gtatttcttcacatccgt

SEQ ID NO: 8860 - DNA, 18 bp, Artificial Sequence
  Target HLA Sequence complement
tatttcttcacatccgtg

SEQ ID NO: 8861 - DNA, 18 bp, Artificial Sequence
  Target HLA Sequence complement
atttcttcacatccgtgt

SEQ ID NO: 8862 - DNA, 18 bp, Artificial Sequence
  Target HLA Sequence complement
tttcttcacatccgtgtc

SEQ ID NO: 8863 - DNA, 18 bp, Artificial Sequence
  Target HLA Sequence complement
ttcttcacatccgtgtcc

SEQ ID NO: 8864 - DNA, 18 bp, Artificial Sequence
  Target HLA Sequence complement
tcttcacatccgtgtccc

SEQ ID NO: 8865 - DNA, 18 bp, Artificial Sequence
  Target HLA Sequence complement
cttcatcgcagtgggcta

SEQ ID NO: 8866 - DNA, 18 bp, Artificial Sequence
  Target HLA Sequence complement
ttcatcgcagtgggctac

SEQ ID NO: 8867 - DNA, 18 bp, Artificial Sequence
  Target HLA Sequence complement
agttcgtgcggttcgaca

SEQ ID NO: 8868 - DNA, 18 bp, Artificial Sequence
  Target HLA Sequence complement
tggatagagcaggagggt

SEQ ID NO: 8869 - DNA, 18 bp, Artificial Sequence
  Target HLA Sequence complement
aggagggtccggagtatt

SEQ ID NO: 8870 - DNA, 18 bp, Artificial Sequence
  Target HLA Sequence complement
gggagacacggaaagtga

SEQ ID NO: 8871 - DNA, 18 bp, Artificial Sequence
  Target HLA Sequence complement
ggagacacggaaagtgaa

SEQ ID NO: 8872 - DNA, 18 bp, Artificial Sequence
  Target HLA Sequence complement
gagacacggaaagtgaag

SEQ ID NO: 8873 - DNA, 18 bp, Artificial Sequence
  Target HLA Sequence complement
agacacggaaagtgaagg

SEQ ID NO: 8874 - DNA, 18 bp, Artificial Sequence
  Target HLA Sequence complement
gacacggaaagtgaaggc

SEQ ID NO: 8875 - DNA, 18 bp, Artificial Sequence
  Target HLA Sequence complement
acacggaaagtgaaggcc

SEQ ID NO: 8876 - DNA, 18 bp, Artificial Sequence
  Target HLA Sequence complement
acggaaagtgaaggccca

SEQ ID NO: 8877 - DNA, 18 bp, Artificial Sequence
  Target HLA Sequence complement
ggaaagtgaaggcccact

SEQ ID NO: 8878 - DNA, 18 bp, Artificial Sequence
  Target HLA Sequence complement
gaaagtgaaggcccactc

SEQ ID NO: 8879 - DNA, 18 bp, Artificial Sequence
  Target HLA Sequence complement
aaagtgaaggcccactca

SEQ ID NO: 8880 - DNA, 18 bp, Artificial Sequence
  Target HLA Sequence complement
aagtgaaggcccactcac

SEQ ID NO: 8881 - DNA, 18 bp, Artificial Sequence
  Target HLA Sequence complement
agtgaaggcccactcaca

SEQ ID NO: 8882 - DNA, 18 bp, Artificial Sequence
  Target HLA Sequence complement
tgaaggcccactcacaga

SEQ ID NO: 8883 - DNA, 18 bp, Artificial Sequence
  Target HLA Sequence complement
aaggcccactcacagact

SEQ ID NO: 8884 - DNA, 18 bp, Artificial Sequence
  Target HLA Sequence complement
cactcacagactcaccga

SEQ ID NO: 8885 - DNA, 18 bp, Artificial Sequence
  Target HLA Sequence complement
actcacagactcaccgag

SEQ ID NO: 8886 - DNA, 18 bp, Artificial Sequence
  Target HLA Sequence complement
ctcacagactcaccgagt

SEQ ID NO: 8887 - DNA, 18 bp, Artificial Sequence
  Target HLA Sequence complement
tcacagactcaccgagtg

SEQ ID NO: 8888 - DNA, 18 bp, Artificial Sequence
  Target HLA Sequence complement
acagactcaccgagtgga

SEQ ID NO: 8889 - DNA, 18 bp, Artificial Sequence
  Target HLA Sequence complement
gcggctactacaaccaga

SEQ ID NO: 8890 - DNA, 18 bp, Artificial Sequence
  Target HLA Sequence complement
cggctactacaaccagag

SEQ ID NO: 8891 - DNA, 18 bp, Artificial Sequence
  Target HLA Sequence complement
ggctactacaaccagagc

SEQ ID NO: 8892 - DNA, 18 bp, Artificial Sequence
  Target HLA Sequence complement
gctactacaaccagagcg

SEQ ID NO: 8893 - DNA, 18 bp, Artificial Sequence
  Target HLA Sequence complement
ctactacaaccagagcga

SEQ ID NO: 8894 - DNA, 18 bp, Artificial Sequence
  Target HLA Sequence complement
tactacaaccagagcgag

SEQ ID NO: 8895 - DNA, 18 bp, Artificial Sequence
  Target HLA Sequence complement
actacaaccagagcgagg

SEQ ID NO: 8896 - DNA, 18 bp, Artificial Sequence
  Target HLA Sequence complement
gttctcacaccgtccaga

SEQ ID NO: 8897 - DNA, 18 bp, Artificial Sequence
  Target HLA Sequence complement
ttctcacaccgtccagag

SEQ ID NO: 8898 - DNA, 18 bp, Artificial Sequence
  Target HLA Sequence complement
tcacaccgtccagaggat

SEQ ID NO: 8899 - DNA, 18 bp, Artificial Sequence
  Target HLA Sequence complement
acaccgtccagaggatgt

SEQ ID NO: 8900 - DNA, 18 bp, Artificial Sequence
  Target HLA Sequence complement
caccgtccagaggatgta

SEQ ID NO: 8901 - DNA, 18 bp, Artificial Sequence
  Target HLA Sequence complement
accgtccagaggatgtat

SEQ ID NO: 8902 - DNA, 18 bp, Artificial Sequence
  Target HLA Sequence complement
ccgtccagaggatgtatg

SEQ ID NO: 8903 - DNA, 18 bp, Artificial Sequence
  Target HLA Sequence complement
cgtccagaggatgtatgg

SEQ ID NO: 8904 - DNA, 18 bp, Artificial Sequence
  Target HLA Sequence complement
gtccagaggatgtatggc

SEQ ID NO: 8905 - DNA, 18 bp, Artificial Sequence
  Target HLA Sequence complement
tccagaggatgtatggct

SEQ ID NO: 8906 - DNA, 18 bp, Artificial Sequence
  Target HLA Sequence complement
ccagaggatgtatggctg

SEQ ID NO: 8907 - DNA, 18 bp, Artificial Sequence
  Target HLA Sequence complement
cagaggatgtatggctgc

SEQ ID NO: 8908 - DNA, 18 bp, Artificial Sequence
  Target HLA Sequence complement
agaggatgtatggctgcg

SEQ ID NO: 8909 - DNA, 18 bp, Artificial Sequence
  Target HLA Sequence complement
gaggatgtatggctgcga

SEQ ID NO: 8910 - DNA, 18 bp, Artificial Sequence
  Target HLA Sequence complement
aggatgtatggctgcgac

SEQ ID NO: 8911 - DNA, 18 bp, Artificial Sequence
  Target HLA Sequence complement
gatgtatggctgcgacgt

SEQ ID NO: 8912 - DNA, 18 bp, Artificial Sequence
  Target HLA Sequence complement
atgtatggctgcgacgtg

SEQ ID NO: 8913 - DNA, 18 bp, Artificial Sequence
  Target HLA Sequence complement
gtaccaccagtacgccta

SEQ ID NO: 8914 - DNA, 18 bp, Artificial Sequence
  Target HLA Sequence complement
taccaccagtacgcctac

SEQ ID NO: 8915 - DNA, 18 bp, Artificial Sequence
  Target HLA Sequence complement
cctacgacggcaaggatt

SEQ ID NO: 8916 - DNA, 18 bp, Artificial Sequence
  Target HLA Sequence complement
ctacgacggcaaggatta

SEQ ID NO: 8917 - DNA, 18 bp, Artificial Sequence
  Target HLA Sequence complement
tacgacggcaaggattac

SEQ ID NO: 8918 - DNA, 18 bp, Artificial Sequence
  Target HLA Sequence complement
acgacggcaaggattaca

SEQ ID NO: 8919 - DNA, 18 bp, Artificial Sequence
  Target HLA Sequence complement
cgacggcaaggattacat

SEQ ID NO: 8920 - DNA, 18 bp, Artificial Sequence
  Target HLA Sequence complement
gacggcaaggattacatc

SEQ ID NO: 8921 - DNA, 18 bp, Artificial Sequence
  Target HLA Sequence complement
acggcaaggattacatcg

SEQ ID NO: 8922 - DNA, 18 bp, Artificial Sequence
  Target HLA Sequence complement
cggcaaggattacatcgc

SEQ ID NO: 8923 - DNA, 18 bp, Artificial Sequence
  Target HLA Sequence complement
ggcaaggattacatcgcc

SEQ ID NO: 8924 - DNA, 18 bp, Artificial Sequence
  Target HLA Sequence complement
gcaaggattacatcgccc

SEQ ID NO: 8925 - DNA, 18 bp, Artificial Sequence
  Target HLA Sequence complement
caaggattacatcgccct

SEQ ID NO: 8926 - DNA, 18 bp, Artificial Sequence
  Target HLA Sequence complement
aaggattacatcgccctg

SEQ ID NO: 8927 - DNA, 18 bp, Artificial Sequence
  Target HLA Sequence complement
aggattacatcgccctga

SEQ ID NO: 8928 - DNA, 18 bp, Artificial Sequence
  Target HLA Sequence complement
ggattacatcgccctgaa

SEQ ID NO: 8929 - DNA, 18 bp, Artificial Sequence
  Target HLA Sequence complement
gattacatcgccctgaaa

SEQ ID NO: 8930 - DNA, 18 bp, Artificial Sequence
  Target HLA Sequence complement
attacatcgccctgaaag

SEQ ID NO: 8931 - DNA, 18 bp, Artificial Sequence
  Target HLA Sequence complement
ttacatcgccctgaaaga

SEQ ID NO: 8932 - DNA, 18 bp, Artificial Sequence
  Target HLA Sequence complement
tacatcgccctgaaagag

SEQ ID NO: 8933 - DNA, 18 bp, Artificial Sequence
  Target HLA Sequence complement
acatcgccctgaaagagg

SEQ ID NO: 8934 - DNA, 18 bp, Artificial Sequence
  Target HLA Sequence complement
catcgccctgaaagagga

SEQ ID NO: 8935 - DNA, 18 bp, Artificial Sequence
  Target HLA Sequence complement
atcgccctgaaagaggac

SEQ ID NO: 8936 - DNA, 18 bp, Artificial Sequence
  Target HLA Sequence complement
tgaaagaggacctgcgct

SEQ ID NO: 8937 - DNA, 18 bp, Artificial Sequence
  Target HLA Sequence complement
aaagaggacctgcgctct

SEQ ID NO: 8938 - DNA, 18 bp, Artificial Sequence
  Target HLA Sequence complement
aagaggacctgcgctctt

SEQ ID NO: 8939 - DNA, 18 bp, Artificial Sequence
  Target HLA Sequence complement
acatggcagctcagacca

SEQ ID NO: 8940 - DNA, 18 bp, Artificial Sequence
  Target HLA Sequence complement
agctcagaccaccaagca

SEQ ID NO: 8941 - DNA, 18 bp, Artificial Sequence
  Target HLA Sequence complement
ctcagaccaccaagcaca

SEQ ID NO: 8942 - DNA, 18 bp, Artificial Sequence
  Target HLA Sequence complement
tcagaccaccaagcacaa

SEQ ID NO: 8943 - DNA, 18 bp, Artificial Sequence
  Target HLA Sequence complement
cagaccaccaagcacaag

SEQ ID NO: 8944 - DNA, 18 bp, Artificial Sequence
  Target HLA Sequence complement
agaccaccaagcacaagt

SEQ ID NO: 8945 - DNA, 18 bp, Artificial Sequence
  Target HLA Sequence complement
gaccaccaagcacaagtg

SEQ ID NO: 8946 - DNA, 18 bp, Artificial Sequence
  Target HLA Sequence complement
accaccaagcacaagtgg

SEQ ID NO: 8947 - DNA, 18 bp, Artificial Sequence
  Target HLA Sequence complement
caccaagcacaagtggga

SEQ ID NO: 8948 - DNA, 18 bp, Artificial Sequence
  Target HLA Sequence complement
accaagcacaagtgggag

SEQ ID NO: 8949 - DNA, 18 bp, Artificial Sequence
  Target HLA Sequence complement
atgtggcggagcagttga

SEQ ID NO: 8950 - DNA, 18 bp, Artificial Sequence
  Target HLA Sequence complement
ggagcagttgagagccta

SEQ ID NO: 8951 - DNA, 18 bp, Artificial Sequence
  Target HLA Sequence complement
gagcagttgagagcctac

SEQ ID NO: 8952 - DNA, 18 bp, Artificial Sequence
  Target HLA Sequence complement
agcagttgagagcctacc

SEQ ID NO: 8953 - DNA, 18 bp, Artificial Sequence
  Target HLA Sequence complement
gcagttgagagcctacct

SEQ ID NO: 8954 - DNA, 18 bp, Artificial Sequence
  Target HLA Sequence complement
cagttgagagcctacctg

SEQ ID NO: 8955 - DNA, 18 bp, Artificial Sequence
  Target HLA Sequence complement
agttgagagcctacctgg

SEQ ID NO: 8956 - DNA, 18 bp, Artificial Sequence
  Target HLA Sequence complement
gttgagagcctacctgga

SEQ ID NO: 8957 - DNA, 18 bp, Artificial Sequence
  Target HLA Sequence complement
ttgagagcctacctggag

SEQ ID NO: 8958 - DNA, 18 bp, Artificial Sequence
  Target HLA Sequence complement
tccgcagatacctggaga

SEQ ID NO: 8959 - DNA, 18 bp, Artificial Sequence
  Target HLA Sequence complement
ccgcagatacctggagaa

SEQ ID NO: 8960 - DNA, 18 bp, Artificial Sequence
  Target HLA Sequence complement
cgcagatacctggagaac

SEQ ID NO: 8961 - DNA, 18 bp, Artificial Sequence
  Target HLA Sequence complement
gcagatacctggagaacg

SEQ ID NO: 8962 - DNA, 18 bp, Artificial Sequence
  Target HLA Sequence complement
cagatacctggagaacgg

SEQ ID NO: 8963 - DNA, 18 bp, Artificial Sequence
  Target HLA Sequence complement
agatacctggagaacggg

SEQ ID NO: 8964 - DNA, 18 bp, Artificial Sequence
  Target HLA Sequence complement
gatacctggagaacggga

SEQ ID NO: 8965 - DNA, 18 bp, Artificial Sequence
  Target HLA Sequence complement
atacctggagaacgggaa

SEQ ID NO: 8966 - DNA, 18 bp, Artificial Sequence
  Target HLA Sequence complement
tacctggagaacgggaag

SEQ ID NO: 8967 - DNA, 18 bp, Artificial Sequence
  Target HLA Sequence complement
tggagaacgggaaggaga

SEQ ID NO: 8968 - DNA, 18 bp, Artificial Sequence
  Target HLA Sequence complement
aaacgcatatgactcacc

SEQ ID NO: 8969 - DNA, 18 bp, Artificial Sequence
  Target HLA Sequence complement
aacgcatatgactcacca

SEQ ID NO: 8970 - DNA, 18 bp, Artificial Sequence
  Target HLA Sequence complement
acgcatatgactcaccac

SEQ ID NO: 8971 - DNA, 18 bp, Artificial Sequence
  Target HLA Sequence complement
cgcatatgactcaccacg

SEQ ID NO: 8972 - DNA, 18 bp, Artificial Sequence
  Target HLA Sequence complement
gcatatgactcaccacgc

SEQ ID NO: 8973 - DNA, 18 bp, Artificial Sequence
  Target HLA Sequence complement
catatgactcaccacgct

SEQ ID NO: 8974 - DNA, 18 bp, Artificial Sequence
  Target HLA Sequence complement
atatgactcaccacgctg

SEQ ID NO: 8975 - DNA, 18 bp, Artificial Sequence
  Target HLA Sequence complement
tatgactcaccacgctgt

SEQ ID NO: 8976 - DNA, 18 bp, Artificial Sequence
  Target HLA Sequence complement
atgactcaccacgctgtc

SEQ ID NO: 8977 - DNA, 18 bp, Artificial Sequence
  Target HLA Sequence complement
tgactcaccacgctgtct

SEQ ID NO: 8978 - DNA, 18 bp, Artificial Sequence
  Target HLA Sequence complement
actcaccacgctgtctct

SEQ ID NO: 8979 - DNA, 18 bp, Artificial Sequence
  Target HLA Sequence complement
tcaccacgctgtctctga

SEQ ID NO: 8980 - DNA, 18 bp, Artificial Sequence
  Target HLA Sequence complement
cacgctgtctctgaccat

SEQ ID NO: 8981 - DNA, 18 bp, Artificial Sequence
  Target HLA Sequence complement
acgctgtctctgaccatg

SEQ ID NO: 8982 - DNA, 18 bp, Artificial Sequence
  Target HLA Sequence complement
cgctgtctctgaccatga

SEQ ID NO: 8983 - DNA, 18 bp, Artificial Sequence
  Target HLA Sequence complement
gctgtctctgaccatgaa

SEQ ID NO: 8984 - DNA, 18 bp, Artificial Sequence
  Target HLA Sequence complement
ctgtctctgaccatgaag

SEQ ID NO: 8985 - DNA, 18 bp, Artificial Sequence
  Target HLA Sequence complement
tgtctctgaccatgaagc

SEQ ID NO: 8986 - DNA, 18 bp, Artificial Sequence
  Target HLA Sequence complement
gtctctgaccatgaagcc

SEQ ID NO: 8987 - DNA, 18 bp, Artificial Sequence
  Target HLA Sequence complement
tctctgaccatgaagcca

SEQ ID NO: 8988 - DNA, 18 bp, Artificial Sequence
  Target HLA Sequence complement
ctctgaccatgaagccac

SEQ ID NO: 8989 - DNA, 18 bp, Artificial Sequence
  Target HLA Sequence complement
tctgaccatgaagccacc

SEQ ID NO: 8990 - DNA, 18 bp, Artificial Sequence
  Target HLA Sequence complement
tgaccatgaagccaccct

SEQ ID NO: 8991 - DNA, 18 bp, Artificial Sequence
  Target HLA Sequence complement
accatgaagccaccctga

SEQ ID NO: 8992 - DNA, 18 bp, Artificial Sequence
  Target HLA Sequence complement
atgaagccaccctgaggt

SEQ ID NO: 8993 - DNA, 18 bp, Artificial Sequence
  Target HLA Sequence complement
cttctaccctgcggagat

SEQ ID NO: 8994 - DNA, 18 bp, Artificial Sequence
  Target HLA Sequence complement
ttctaccctgcggagatc

SEQ ID NO: 8995 - DNA, 18 bp, Artificial Sequence
  Target HLA Sequence complement
tctaccctgcggagatca

SEQ ID NO: 8996 - DNA, 18 bp, Artificial Sequence
  Target HLA Sequence complement
taccctgcggagatcaca

SEQ ID NO: 8997 - DNA, 18 bp, Artificial Sequence
  Target HLA Sequence complement
ctgcggagatcacactga

SEQ ID NO: 8998 - DNA, 18 bp, Artificial Sequence
  Target HLA Sequence complement
tgcggagatcacactgac

SEQ ID NO: 8999 - DNA, 18 bp, Artificial Sequence
  Target HLA Sequence complement
cggagatcacactgacct

SEQ ID NO: 9000 - DNA, 18 bp, Artificial Sequence
  Target HLA Sequence complement
ggagatcacactgacctg

SEQ ID NO: 9001 - DNA, 18 bp, Artificial Sequence
  Target HLA Sequence complement
gagatcacactgacctgg

SEQ ID NO: 9002 - DNA, 18 bp, Artificial Sequence
  Target HLA Sequence complement
agatcacactgacctggc

SEQ ID NO: 9003 - DNA, 18 bp, Artificial Sequence
  Target HLA Sequence complement
gatcacactgacctggca

SEQ ID NO: 9004 - DNA, 18 bp, Artificial Sequence
  Target HLA Sequence complement
atcacactgacctggcag

SEQ ID NO: 9005 - DNA, 18 bp, Artificial Sequence
  Target HLA Sequence complement
gggatggaaccttccaga

SEQ ID NO: 9006 - DNA, 18 bp, Artificial Sequence
  Target HLA Sequence complement
ggatggaaccttccagaa

SEQ ID NO: 9007 - DNA, 18 bp, Artificial Sequence
  Target HLA Sequence complement
gatggaaccttccagaag

SEQ ID NO: 9008 - DNA, 18 bp, Artificial Sequence
  Target HLA Sequence complement
atggaaccttccagaagt

SEQ ID NO: 9009 - DNA, 18 bp, Artificial Sequence
  Target HLA Sequence complement
tggaaccttccagaagtg

SEQ ID NO: 9010 - DNA, 18 bp, Artificial Sequence
  Target HLA Sequence complement
ggaaccttccagaagtgg

SEQ ID NO: 9011 - DNA, 18 bp, Artificial Sequence
  Target HLA Sequence complement
gaaccttccagaagtggg

SEQ ID NO: 9012 - DNA, 18 bp, Artificial Sequence
  Target HLA Sequence complement
aaccttccagaagtgggc

SEQ ID NO: 9013 - DNA, 18 bp, Artificial Sequence
  Target HLA Sequence complement
cttctggacaggagcaga

SEQ ID NO: 9014 - DNA, 18 bp, Artificial Sequence
  Target HLA Sequence complement
ttctggacaggagcagag

SEQ ID NO: 9015 - DNA, 18 bp, Artificial Sequence
  Target HLA Sequence complement
tctggacaggagcagaga

SEQ ID NO: 9016 - DNA, 18 bp, Artificial Sequence
  Target HLA Sequence complement
ctggacaggagcagagat

SEQ ID NO: 9017 - DNA, 18 bp, Artificial Sequence
  Target HLA Sequence complement
tggacaggagcagagata

SEQ ID NO: 9018 - DNA, 18 bp, Artificial Sequence
  Target HLA Sequence complement
ggacaggagcagagatac

SEQ ID NO: 9019 - DNA, 18 bp, Artificial Sequence
  Target HLA Sequence complement
gacaggagcagagataca

SEQ ID NO: 9020 - DNA, 18 bp, Artificial Sequence
  Target HLA Sequence complement
acaggagcagagatacac

SEQ ID NO: 9021 - DNA, 18 bp, Artificial Sequence
  Target HLA Sequence complement
caggagcagagatacacc

SEQ ID NO: 9022 - DNA, 18 bp, Artificial Sequence
  Target HLA Sequence complement
aggagcagagatacacct

SEQ ID NO: 9023 - DNA, 18 bp, Artificial Sequence
  Target HLA Sequence complement
ggagcagagatacacctg

SEQ ID NO: 9024 - DNA, 18 bp, Artificial Sequence
  Target HLA Sequence complement
gagcagagatacacctgc

SEQ ID NO: 9025 - DNA, 18 bp, Artificial Sequence
  Target HLA Sequence complement
agcagagatacacctgcc

SEQ ID NO: 9026 - DNA, 18 bp, Artificial Sequence
  Target HLA Sequence complement
gcagagatacacctgcca

SEQ ID NO: 9027 - DNA, 18 bp, Artificial Sequence
  Target HLA Sequence complement
cagagatacacctgccat

SEQ ID NO: 9028 - DNA, 18 bp, Artificial Sequence
  Target HLA Sequence complement
agagatacacctgccatg

SEQ ID NO: 9029 - DNA, 18 bp, Artificial Sequence
  Target HLA Sequence complement
gagatacacctgccatgt

SEQ ID NO: 9030 - DNA, 18 bp, Artificial Sequence
  Target HLA Sequence complement
agatacacctgccatgtg

SEQ ID NO: 9031 - DNA, 18 bp, Artificial Sequence
  Target HLA Sequence complement
gatacacctgccatgtgc

SEQ ID NO: 9032 - DNA, 18 bp, Artificial Sequence
  Target HLA Sequence complement
atacacctgccatgtgca

SEQ ID NO: 9033 - DNA, 18 bp, Artificial Sequence
  Target HLA Sequence complement
tacacctgccatgtgcag

SEQ ID NO: 9034 - DNA, 18 bp, Artificial Sequence
  Target HLA Sequence complement
acctgccatgtgcagcat

SEQ ID NO: 9035 - DNA, 18 bp, Artificial Sequence
  Target HLA Sequence complement
ctgccatgtgcagcatga

SEQ ID NO: 9036 - DNA, 18 bp, Artificial Sequence
  Target HLA Sequence complement
tgccatgtgcagcatgag

SEQ ID NO: 9037 - DNA, 18 bp, Artificial Sequence
  Target HLA Sequence complement
catgtgcagcatgagggt

SEQ ID NO: 9038 - DNA, 18 bp, Artificial Sequence
  Target HLA Sequence complement
atgtgcagcatgagggtt

SEQ ID NO: 9039 - DNA, 18 bp, Artificial Sequence
  Target HLA Sequence complement
tgtgcagcatgagggttt

SEQ ID NO: 9040 - DNA, 18 bp, Artificial Sequence
  Target HLA Sequence complement
gtgcagcatgagggtttg

SEQ ID NO: 9041 - DNA, 18 bp, Artificial Sequence
  Target HLA Sequence complement
tgcagcatgagggtttgc

SEQ ID NO: 9042 - DNA, 18 bp, Artificial Sequence
  Target HLA Sequence complement
agcatgagggtttgccca

SEQ ID NO: 9043 - DNA, 18 bp, Artificial Sequence
  Target HLA Sequence complement
gcatgagggtttgcccaa

SEQ ID NO: 9044 - DNA, 18 bp, Artificial Sequence
  Target HLA Sequence complement
catgagggtttgcccaag

SEQ ID NO: 9045 - DNA, 18 bp, Artificial Sequence
  Target HLA Sequence complement
atgagggtttgcccaagc

SEQ ID NO: 9046 - DNA, 18 bp, Artificial Sequence
  Target HLA Sequence complement
tgagatgggagccgtctt

SEQ ID NO: 9047 - DNA, 18 bp, Artificial Sequence
  Target HLA Sequence complement
cccatcgtgggcatcatt

SEQ ID NO: 9048 - DNA, 18 bp, Artificial Sequence
  Target HLA Sequence complement
ccatcgtgggcatcattg

SEQ ID NO: 9049 - DNA, 18 bp, Artificial Sequence
  Target HLA Sequence complement
catcgtgggcatcattgc

SEQ ID NO: 9050 - DNA, 18 bp, Artificial Sequence
  Target HLA Sequence complement
atcgtgggcatcattgct

SEQ ID NO: 9051 - DNA, 18 bp, Artificial Sequence
  Target HLA Sequence complement
tcgtgggcatcattgctg

SEQ ID NO: 9052 - DNA, 18 bp, Artificial Sequence
  Target HLA Sequence complement
catcattgctggcctggt

SEQ ID NO: 9053 - DNA, 18 bp, Artificial Sequence
  Target HLA Sequence complement
atcattgctggcctggtt

SEQ ID NO: 9054 - DNA, 18 bp, Artificial Sequence
  Target HLA Sequence complement
tcattgctggcctggttc

SEQ ID NO: 9055 - DNA, 18 bp, Artificial Sequence
  Target HLA Sequence complement
cattgctggcctggttct

SEQ ID NO: 9056 - DNA, 18 bp, Artificial Sequence
  Target HLA Sequence complement
attgctggcctggttctc

SEQ ID NO: 9057 - DNA, 18 bp, Artificial Sequence
  Target HLA Sequence complement
ttgctggcctggttctct

SEQ ID NO: 9058 - DNA, 18 bp, Artificial Sequence
  Target HLA Sequence complement
tgctggcctggttctctt

SEQ ID NO: 9059 - DNA, 18 bp, Artificial Sequence
  Target HLA Sequence complement
gctggcctggttctcttt

SEQ ID NO: 9060 - DNA, 18 bp, Artificial Sequence
  Target HLA Sequence complement
ctggcctggttctctttg

SEQ ID NO: 9061 - DNA, 18 bp, Artificial Sequence
  Target HLA Sequence complement
tggcctggttctctttgg

SEQ ID NO: 9062 - DNA, 18 bp, Artificial Sequence
  Target HLA Sequence complement
ggcctggttctctttgga

SEQ ID NO: 9063 - DNA, 18 bp, Artificial Sequence
  Target HLA Sequence complement
gcctggttctctttggag

SEQ ID NO: 9064 - DNA, 18 bp, Artificial Sequence
  Target HLA Sequence complement
cctggttctctttggagc

SEQ ID NO: 9065 - DNA, 18 bp, Artificial Sequence
  Target HLA Sequence complement
ctggttctctttggagct

SEQ ID NO: 9066 - DNA, 18 bp, Artificial Sequence
  Target HLA Sequence complement
tggttctctttggagctg

SEQ ID NO: 9067 - DNA, 18 bp, Artificial Sequence
  Target HLA Sequence complement
ggttctctttggagctgt

SEQ ID NO: 9068 - DNA, 18 bp, Artificial Sequence
  Target HLA Sequence complement
gttctctttggagctgtg

SEQ ID NO: 9069 - DNA, 18 bp, Artificial Sequence
  Target HLA Sequence complement
ttctctttggagctgtga

SEQ ID NO: 9070 - DNA, 18 bp, Artificial Sequence
  Target HLA Sequence complement
tctctttggagctgtgat

SEQ ID NO: 9071 - DNA, 18 bp, Artificial Sequence
  Target HLA Sequence complement
ctctttggagctgtgatc

SEQ ID NO: 9072 - DNA, 18 bp, Artificial Sequence
  Target HLA Sequence complement
tctttggagctgtgatca

SEQ ID NO: 9073 - DNA, 18 bp, Artificial Sequence
  Target HLA Sequence complement
ctttggagctgtgatcac

SEQ ID NO: 9074 - DNA, 18 bp, Artificial Sequence
  Target HLA Sequence complement
tttggagctgtgatcact

SEQ ID NO: 9075 - DNA, 18 bp, Artificial Sequence
  Target HLA Sequence complement
ttggagctgtgatcactg

SEQ ID NO: 9076 - DNA, 18 bp, Artificial Sequence
  Target HLA Sequence complement
tggagctgtgatcactgg

SEQ ID NO: 9077 - DNA, 18 bp, Artificial Sequence
  Target HLA Sequence complement
ggagctgtgatcactgga

SEQ ID NO: 9078 - DNA, 18 bp, Artificial Sequence
  Target HLA Sequence complement
gagctgtgatcactggag

SEQ ID NO: 9079 - DNA, 18 bp, Artificial Sequence
  Target HLA Sequence complement
agctgtgatcactggagc

SEQ ID NO: 9080 - DNA, 18 bp, Artificial Sequence
  Target HLA Sequence complement
gctgtgatcactggagct

SEQ ID NO: 9081 - DNA, 18 bp, Artificial Sequence
  Target HLA Sequence complement
ctgtgatcactggagctg

SEQ ID NO: 9082 - DNA, 18 bp, Artificial Sequence
  Target HLA Sequence complement
tgtgatcactggagctgt

SEQ ID NO: 9083 - DNA, 18 bp, Artificial Sequence
  Target HLA Sequence complement
gtgatcactggagctgtg

SEQ ID NO: 9084 - DNA, 18 bp, Artificial Sequence
  Target HLA Sequence complement
tgatcactggagctgtgg

SEQ ID NO: 9085 - DNA, 18 bp, Artificial Sequence
  Target HLA Sequence complement
gatcactggagctgtggt

SEQ ID NO: 9086 - DNA, 18 bp, Artificial Sequence
  Target HLA Sequence complement
atcactggagctgtggtc

SEQ ID NO: 9087 - DNA, 18 bp, Artificial Sequence
  Target HLA Sequence complement
tgtggtcgctgctgtgat

SEQ ID NO: 9088 - DNA, 18 bp, Artificial Sequence
  Target HLA Sequence complement
tggtcgctgctgtgatgt

SEQ ID NO: 9089 - DNA, 18 bp, Artificial Sequence
  Target HLA Sequence complement
tcgctgctgtgatgtgga

SEQ ID NO: 9090 - DNA, 18 bp, Artificial Sequence
  Target HLA Sequence complement
ctgctgtgatgtggagga

SEQ ID NO: 9091 - DNA, 18 bp, Artificial Sequence
  Target HLA Sequence complement
tgctgtgatgtggaggag

SEQ ID NO: 9092 - DNA, 18 bp, Artificial Sequence
  Target HLA Sequence complement
ctgtgatgtggaggagga

SEQ ID NO: 9093 - DNA, 18 bp, Artificial Sequence
  Target HLA Sequence complement
tgtgatgtggaggaggaa

SEQ ID NO: 9094 - DNA, 18 bp, Artificial Sequence
  Target HLA Sequence complement
gtgatgtggaggaggaag

SEQ ID NO: 9095 - DNA, 18 bp, Artificial Sequence
  Target HLA Sequence complement
tgatgtggaggaggaaga

SEQ ID NO: 9096 - DNA, 18 bp, Artificial Sequence
  Target HLA Sequence complement
gatgtggaggaggaagag

SEQ ID NO: 9097 - DNA, 18 bp, Artificial Sequence
  Target HLA Sequence complement
atgtggaggaggaagagc

SEQ ID NO: 9098 - DNA, 18 bp, Artificial Sequence
  Target HLA Sequence complement
tgtggaggaggaagagct

SEQ ID NO: 9099 - DNA, 18 bp, Artificial Sequence
  Target HLA Sequence complement
tggaggaggaagagctca

SEQ ID NO: 9100 - DNA, 18 bp, Artificial Sequence
  Target HLA Sequence complement
gaggaggaagagctcaga

SEQ ID NO: 9101 - DNA, 18 bp, Artificial Sequence
  Target HLA Sequence complement
aggaggaagagctcagat

SEQ ID NO: 9102 - DNA, 18 bp, Artificial Sequence
  Target HLA Sequence complement
ggaggaagagctcagata

SEQ ID NO: 9103 - DNA, 18 bp, Artificial Sequence
  Target HLA Sequence complement
gaggaagagctcagatag

SEQ ID NO: 9104 - DNA, 18 bp, Artificial Sequence
  Target HLA Sequence complement
aggaagagctcagataga

SEQ ID NO: 9105 - DNA, 18 bp, Artificial Sequence
  Target HLA Sequence complement
ggaagagctcagatagaa

SEQ ID NO: 9106 - DNA, 18 bp, Artificial Sequence
  Target HLA Sequence complement
gaagagctcagatagaaa

SEQ ID NO: 9107 - DNA, 18 bp, Artificial Sequence
  Target HLA Sequence complement
aaaggagggagctactct

SEQ ID NO: 9108 - DNA, 18 bp, Artificial Sequence
  Target HLA Sequence complement
aaggagggagctactctc

SEQ ID NO: 9109 - DNA, 18 bp, Artificial Sequence
  Target HLA Sequence complement
aggagggagctactctca

SEQ ID NO: 9110 - DNA, 18 bp, Artificial Sequence
  Target HLA Sequence complement
agctactctcaggctgca

SEQ ID NO: 9111 - DNA, 18 bp, Artificial Sequence
  Target HLA Sequence complement
gctactctcaggctgcaa

SEQ ID NO: 9112 - DNA, 18 bp, Artificial Sequence
  Target HLA Sequence complement
ctactctcaggctgcaag

SEQ ID NO: 9113 - DNA, 18 bp, Artificial Sequence
  Target HLA Sequence complement
tactctcaggctgcaagc

SEQ ID NO: 9114 - DNA, 18 bp, Artificial Sequence
  Target HLA Sequence complement
actctcaggctgcaagca

SEQ ID NO: 9115 - DNA, 18 bp, Artificial Sequence
  Target HLA Sequence complement
tctcaggctgcaagcagt

SEQ ID NO: 9116 - DNA, 18 bp, Artificial Sequence
  Target HLA Sequence complement
tcaggctgcaagcagtga

SEQ ID NO: 9117 - DNA, 18 bp, Artificial Sequence
  Target HLA Sequence complement
aggctgcaagcagtgaca

SEQ ID NO: 9118 - DNA, 18 bp, Artificial Sequence
  Target HLA Sequence complement
gctgcaagcagtgacagt

SEQ ID NO: 9119 - DNA, 18 bp, Artificial Sequence
  Target HLA Sequence complement
ctgcaagcagtgacagtg

SEQ ID NO: 9120 - DNA, 18 bp, Artificial Sequence
  Target HLA Sequence complement
tgcaagcagtgacagtgc

SEQ ID NO: 9121 - DNA, 18 bp, Artificial Sequence
  Target HLA Sequence complement
aagcagtgacagtgccca

SEQ ID NO: 9122 - DNA, 18 bp, Artificial Sequence
  Target HLA Sequence complement
cagggctctgatgtgtct

SEQ ID NO: 9123 - DNA, 18 bp, Artificial Sequence
  Target HLA Sequence complement
agggctctgatgtgtctc

SEQ ID NO: 9124 - DNA, 18 bp, Artificial Sequence
  Target HLA Sequence complement
gggctctgatgtgtctct

SEQ ID NO: 9125 - DNA, 18 bp, Artificial Sequence
  Target HLA Sequence complement
ggctctgatgtgtctctc

SEQ ID NO: 9126 - DNA, 18 bp, Artificial Sequence
  Target HLA Sequence complement
gctctgatgtgtctctca

SEQ ID NO: 9127 - DNA, 18 bp, Artificial Sequence
  Target HLA Sequence complement
ctctgatgtgtctctcac

SEQ ID NO: 9128 - DNA, 18 bp, Artificial Sequence
  Target HLA Sequence complement
tctgatgtgtctctcaca

SEQ ID NO: 9129 - DNA, 18 bp, Artificial Sequence
  Target HLA Sequence complement
ctgatgtgtctctcacag

SEQ ID NO: 9130 - DNA, 18 bp, Artificial Sequence
  Target HLA Sequence complement
tgatgtgtctctcacagc

SEQ ID NO: 9131 - DNA, 18 bp, Artificial Sequence
  Target HLA Sequence complement
gatgtgtctctcacagct

SEQ ID NO: 9132 - DNA, 18 bp, Artificial Sequence
  Target HLA Sequence complement
atgtgtctctcacagctt

SEQ ID NO: 9133 - DNA, 18 bp, Artificial Sequence
  Target HLA Sequence complement
tgtgtctctcacagcttg

SEQ ID NO: 9134 - DNA, 18 bp, Artificial Sequence
  Target HLA Sequence complement
gtgtctctcacagcttgt

SEQ ID NO: 9135 - DNA, 18 bp, Artificial Sequence
  Target HLA Sequence complement
tgtctctcacagcttgta

SEQ ID NO: 9136 - DNA, 18 bp, Artificial Sequence
  Target HLA Sequence complement
gtctctcacagcttgtaa

SEQ ID NO: 9137 - DNA, 18 bp, Artificial Sequence
  Target HLA Sequence complement
tctctcacagcttgtaaa

SEQ ID NO: 9138 - DNA, 18 bp, Artificial Sequence
  Target HLA Sequence complement
ctctcacagcttgtaaag

SEQ ID NO: 9139 - DNA, 18 bp, Artificial Sequence
  Target HLA Sequence complement
tctcacagcttgtaaagt

SEQ ID NO: 9140 - DNA, 18 bp, Artificial Sequence
  Target HLA Sequence complement
ctcacagcttgtaaagtg

SEQ ID NO: 9141 - DNA, 18 bp, Artificial Sequence
  Target HLA Sequence complement
tcacagcttgtaaagtgt

SEQ ID NO: 9142 - DNA, 18 bp, Artificial Sequence
  Target HLA Sequence complement
cacagcttgtaaagtgtg

SEQ ID NO: 9143 - DNA, 18 bp, Artificial Sequence
  Target HLA Sequence complement
acagcttgtaaagtgtga

SEQ ID NO: 9144 - DNA, 18 bp, Artificial Sequence
  Target HLA Sequence complement
cagcttgtaaagtgtgag

SEQ ID NO: 9145 - DNA, 18 bp, Artificial Sequence
  Target HLA Sequence complement
agcttgtaaagtgtgaga

SEQ ID NO: 9146 - DNA, 18 bp, Artificial Sequence
  Target HLA Sequence complement
gcttgtaaagtgtgagac

SEQ ID NO: 9147 - DNA, 18 bp, Artificial Sequence
  Target HLA Sequence complement
cttgtaaagtgtgagaca

SEQ ID NO: 9148 - DNA, 18 bp, Artificial Sequence
  Target HLA Sequence complement
ttgtaaagtgtgagacag

SEQ ID NO: 9149 - DNA, 18 bp, Artificial Sequence
  Target HLA Sequence complement
tgtaaagtgtgagacagc

SEQ ID NO: 9150 - DNA, 18 bp, Artificial Sequence
  Target HLA Sequence complement
gtaaagtgtgagacagct

SEQ ID NO: 9151 - DNA, 18 bp, Artificial Sequence
  Target HLA Sequence complement
taaagtgtgagacagctg

SEQ ID NO: 9152 - DNA, 18 bp, Artificial Sequence
  Target HLA Sequence complement
aaagtgtgagacagctgc

SEQ ID NO: 9153 - DNA, 18 bp, Artificial Sequence
  Target HLA Sequence complement
aagtgtgagacagctgcc

SEQ ID NO: 9154 - DNA, 18 bp, Artificial Sequence
  Target HLA Sequence complement
agtgtgagacagctgcct

SEQ ID NO: 9155 - DNA, 18 bp, Artificial Sequence
  Target HLA Sequence complement
gtgtgagacagctgcctt

SEQ ID NO: 9156 - DNA, 18 bp, Artificial Sequence
  Target HLA Sequence complement
tgtgagacagctgccttg

SEQ ID NO: 9157 - DNA, 18 bp, Artificial Sequence
  Target HLA Sequence complement
gtgagacagctgccttgt

SEQ ID NO: 9158 - DNA, 18 bp, Artificial Sequence
  Target HLA Sequence complement
tgagacagctgccttgtg

SEQ ID NO: 9159 - DNA, 18 bp, Artificial Sequence
  Target HLA Sequence complement
gagacagctgccttgtgt

SEQ ID NO: 9160 - DNA, 18 bp, Artificial Sequence
  Target HLA Sequence complement
agacagctgccttgtgtg

SEQ ID NO: 9161 - DNA, 18 bp, Artificial Sequence
  Target HLA Sequence complement
tgccttgtgtgggactga

SEQ ID NO: 9162 - DNA, 18 bp, Artificial Sequence
  Target HLA Sequence complement
ccttgtgtgggactgaga

SEQ ID NO: 9163 - DNA, 18 bp, Artificial Sequence
  Target HLA Sequence complement
cttgtgtgggactgagag

SEQ ID NO: 9164 - DNA, 18 bp, Artificial Sequence
  Target HLA Sequence complement
ttgtgtgggactgagagg

SEQ ID NO: 9165 - DNA, 18 bp, Artificial Sequence
  Target HLA Sequence complement
tgtgggactgagaggcaa

SEQ ID NO: 9166 - DNA, 18 bp, Artificial Sequence
  Target HLA Sequence complement
tgggactgagaggcaaga

SEQ ID NO: 9167 - DNA, 18 bp, Artificial Sequence
  Target HLA Sequence complement
ggactgagaggcaagagt

SEQ ID NO: 9168 - DNA, 18 bp, Artificial Sequence
  Target HLA Sequence complement
gactgagaggcaagagtt

SEQ ID NO: 9169 - DNA, 18 bp, Artificial Sequence
  Target HLA Sequence complement
actgagaggcaagagttg

SEQ ID NO: 9170 - DNA, 18 bp, Artificial Sequence
  Target HLA Sequence complement
ctgagaggcaagagttgt

SEQ ID NO: 9171 - DNA, 18 bp, Artificial Sequence
  Target HLA Sequence complement
tgagaggcaagagttgtt

SEQ ID NO: 9172 - DNA, 18 bp, Artificial Sequence
  Target HLA Sequence complement
gagaggcaagagttgttc

SEQ ID NO: 9173 - DNA, 18 bp, Artificial Sequence
  Target HLA Sequence complement
agaggcaagagttgttcc

SEQ ID NO: 9174 - DNA, 18 bp, Artificial Sequence
  Target HLA Sequence complement
gaggcaagagttgttcct

SEQ ID NO: 9175 - DNA, 18 bp, Artificial Sequence
  Target HLA Sequence complement
aggcaagagttgttcctg

SEQ ID NO: 9176 - DNA, 18 bp, Artificial Sequence
  Target HLA Sequence complement
ggcaagagttgttcctgc

SEQ ID NO: 9177 - DNA, 18 bp, Artificial Sequence
  Target HLA Sequence complement
gcaagagttgttcctgcc

SEQ ID NO: 9178 - DNA, 18 bp, Artificial Sequence
  Target HLA Sequence complement
caagagttgttcctgccc

SEQ ID NO: 9179 - DNA, 18 bp, Artificial Sequence
  Target HLA Sequence complement
aagagttgttcctgccct

SEQ ID NO: 9180 - DNA, 18 bp, Artificial Sequence
  Target HLA Sequence complement
agagttgttcctgccctt

SEQ ID NO: 9181 - DNA, 18 bp, Artificial Sequence
  Target HLA Sequence complement
gagttgttcctgcccttc

SEQ ID NO: 9182 - DNA, 18 bp, Artificial Sequence
  Target HLA Sequence complement
agttgttcctgcccttcc

SEQ ID NO: 9183 - DNA, 18 bp, Artificial Sequence
  Target HLA Sequence complement
ttgttcctgcccttccct

SEQ ID NO: 9184 - DNA, 18 bp, Artificial Sequence
  Target HLA Sequence complement
tgttcctgcccttccctt

SEQ ID NO: 9185 - DNA, 18 bp, Artificial Sequence
  Target HLA Sequence complement
gttcctgcccttcccttt

SEQ ID NO: 9186 - DNA, 18 bp, Artificial Sequence
  Target HLA Sequence complement
ttcctgcccttccctttg

SEQ ID NO: 9187 - DNA, 18 bp, Artificial Sequence
  Target HLA Sequence complement
tcctgcccttccctttgt

SEQ ID NO: 9188 - DNA, 18 bp, Artificial Sequence
  Target HLA Sequence complement
ctgcccttccctttgtga

SEQ ID NO: 9189 - DNA, 18 bp, Artificial Sequence
  Target HLA Sequence complement
tgcccttccctttgtgac

SEQ ID NO: 9190 - DNA, 18 bp, Artificial Sequence
  Target HLA Sequence complement
gcccttccctttgtgact

SEQ ID NO: 9191 - DNA, 18 bp, Artificial Sequence
  Target HLA Sequence complement
cccttccctttgtgactt

SEQ ID NO: 9192 - DNA, 18 bp, Artificial Sequence
  Target HLA Sequence complement
ccttccctttgtgacttg

SEQ ID NO: 9193 - DNA, 18 bp, Artificial Sequence
  Target HLA Sequence complement
cttccctttgtgacttga

SEQ ID NO: 9194 - DNA, 18 bp, Artificial Sequence
  Target HLA Sequence complement
ttccctttgtgacttgaa

SEQ ID NO: 9195 - DNA, 18 bp, Artificial Sequence
  Target HLA Sequence complement
tccctttgtgacttgaag

SEQ ID NO: 9196 - DNA, 18 bp, Artificial Sequence
  Target HLA Sequence complement
ccctttgtgacttgaaga

SEQ ID NO: 9197 - DNA, 18 bp, Artificial Sequence
  Target HLA Sequence complement
cctttgtgacttgaagaa

SEQ ID NO: 9198 - DNA, 18 bp, Artificial Sequence
  Target HLA Sequence complement
ctttgtgacttgaagaac

SEQ ID NO: 9199 - DNA, 18 bp, Artificial Sequence
  Target HLA Sequence complement
tttgtgacttgaagaacc

SEQ ID NO: 9200 - DNA, 18 bp, Artificial Sequence
  Target HLA Sequence complement
ttgtgacttgaagaaccc

SEQ ID NO: 9201 - DNA, 18 bp, Artificial Sequence
  Target HLA Sequence complement
tgtgacttgaagaaccct

SEQ ID NO: 9202 - DNA, 18 bp, Artificial Sequence
  Target HLA Sequence complement
gtgacttgaagaaccctg

SEQ ID NO: 9203 - DNA, 18 bp, Artificial Sequence
  Target HLA Sequence complement
tgacttgaagaaccctga

SEQ ID NO: 9204 - DNA, 18 bp, Artificial Sequence
  Target HLA Sequence complement
gacttgaagaaccctgac

SEQ ID NO: 9205 - DNA, 18 bp, Artificial Sequence
  Target HLA Sequence complement
acttgaagaaccctgact

SEQ ID NO: 9206 - DNA, 18 bp, Artificial Sequence
  Target HLA Sequence complement
cttgaagaaccctgactt

SEQ ID NO: 9207 - DNA, 18 bp, Artificial Sequence
  Target HLA Sequence complement
ttgaagaaccctgacttt

SEQ ID NO: 9208 - DNA, 18 bp, Artificial Sequence
  Target HLA Sequence complement
tgaagaaccctgactttg

SEQ ID NO: 9209 - DNA, 18 bp, Artificial Sequence
  Target HLA Sequence complement
gaagaaccctgactttgt

SEQ ID NO: 9210 - DNA, 18 bp, Artificial Sequence
  Target HLA Sequence complement
aagaaccctgactttgtt

SEQ ID NO: 9211 - DNA, 18 bp, Artificial Sequence
  Target HLA Sequence complement
agaaccctgactttgttt

SEQ ID NO: 9212 - DNA, 18 bp, Artificial Sequence
  Target HLA Sequence complement
gaaccctgactttgtttc

SEQ ID NO: 9213 - DNA, 18 bp, Artificial Sequence
  Target HLA Sequence complement
aaccctgactttgtttct

SEQ ID NO: 9214 - DNA, 18 bp, Artificial Sequence
  Target HLA Sequence complement
accctgactttgtttctg

SEQ ID NO: 9215 - DNA, 18 bp, Artificial Sequence
  Target HLA Sequence complement
ccctgactttgtttctgc

SEQ ID NO: 9216 - DNA, 18 bp, Artificial Sequence
  Target HLA Sequence complement
cctgactttgtttctgca

SEQ ID NO: 9217 - DNA, 18 bp, Artificial Sequence
  Target HLA Sequence complement
ctgactttgtttctgcaa

SEQ ID NO: 9218 - DNA, 18 bp, Artificial Sequence
  Target HLA Sequence complement
tgactttgtttctgcaaa

SEQ ID NO: 9219 - DNA, 18 bp, Artificial Sequence
  Target HLA Sequence complement
gactttgtttctgcaaag

SEQ ID NO: 9220 - DNA, 18 bp, Artificial Sequence
  Target HLA Sequence complement
actttgtttctgcaaagg

SEQ ID NO: 9221 - DNA, 18 bp, Artificial Sequence
  Target HLA Sequence complement
ctttgtttctgcaaaggc

SEQ ID NO: 9222 - DNA, 18 bp, Artificial Sequence
  Target HLA Sequence complement
tttgtttctgcaaaggca

SEQ ID NO: 9223 - DNA, 18 bp, Artificial Sequence
  Target HLA Sequence complement
ttgtttctgcaaaggcac

SEQ ID NO: 9224 - DNA, 18 bp, Artificial Sequence
  Target HLA Sequence complement
tgtttctgcaaaggcacc

SEQ ID NO: 9225 - DNA, 18 bp, Artificial Sequence
  Target HLA Sequence complement
gtttctgcaaaggcacct

SEQ ID NO: 9226 - DNA, 18 bp, Artificial Sequence
  Target HLA Sequence complement
tttctgcaaaggcacctg

SEQ ID NO: 9227 - DNA, 18 bp, Artificial Sequence
  Target HLA Sequence complement
ttctgcaaaggcacctgc

SEQ ID NO: 9228 - DNA, 18 bp, Artificial Sequence
  Target HLA Sequence complement
tctgcaaaggcacctgca

SEQ ID NO: 9229 - DNA, 18 bp, Artificial Sequence
  Target HLA Sequence complement
ctgcaaaggcacctgcat

SEQ ID NO: 9230 - DNA, 18 bp, Artificial Sequence
  Target HLA Sequence complement
tgcaaaggcacctgcatg

SEQ ID NO: 9231 - DNA, 18 bp, Artificial Sequence
  Target HLA Sequence complement
gcaaaggcacctgcatgt

SEQ ID NO: 9232 - DNA, 18 bp, Artificial Sequence
  Target HLA Sequence complement
caaaggcacctgcatgtg

SEQ ID NO: 9233 - DNA, 18 bp, Artificial Sequence
  Target HLA Sequence complement
aaaggcacctgcatgtgt

SEQ ID NO: 9234 - DNA, 18 bp, Artificial Sequence
  Target HLA Sequence complement
aaggcacctgcatgtgtc

SEQ ID NO: 9235 - DNA, 18 bp, Artificial Sequence
  Target HLA Sequence complement
aggcacctgcatgtgtct

SEQ ID NO: 9236 - DNA, 18 bp, Artificial Sequence
  Target HLA Sequence complement
gcacctgcatgtgtctgt

SEQ ID NO: 9237 - DNA, 18 bp, Artificial Sequence
  Target HLA Sequence complement
cacctgcatgtgtctgtg

SEQ ID NO: 9238 - DNA, 18 bp, Artificial Sequence
  Target HLA Sequence complement
acctgcatgtgtctgtgt

SEQ ID NO: 9239 - DNA, 18 bp, Artificial Sequence
  Target HLA Sequence complement
cctgcatgtgtctgtgtt

SEQ ID NO: 9240 - DNA, 18 bp, Artificial Sequence
  Target HLA Sequence complement
ctgcatgtgtctgtgttc

SEQ ID NO: 9241 - DNA, 18 bp, Artificial Sequence
  Target HLA Sequence complement
tgcatgtgtctgtgttcg

SEQ ID NO: 9242 - DNA, 18 bp, Artificial Sequence
  Target HLA Sequence complement
gcatgtgtctgtgttcgt

SEQ ID NO: 9243 - DNA, 18 bp, Artificial Sequence
  Target HLA Sequence complement
catgtgtctgtgttcgtg

SEQ ID NO: 9244 - DNA, 18 bp, Artificial Sequence
  Target HLA Sequence complement
atgtgtctgtgttcgtgt

SEQ ID NO: 9245 - DNA, 18 bp, Artificial Sequence
  Target HLA Sequence complement
tgtgtctgtgttcgtgta

SEQ ID NO: 9246 - DNA, 18 bp, Artificial Sequence
  Target HLA Sequence complement
gtgtctgtgttcgtgtag

SEQ ID NO: 9247 - DNA, 18 bp, Artificial Sequence
  Target HLA Sequence complement
tgtctgtgttcgtgtagg

SEQ ID NO: 9248 - DNA, 18 bp, Artificial Sequence
  Target HLA Sequence complement
gtctgtgttcgtgtaggc

SEQ ID NO: 9249 - DNA, 18 bp, Artificial Sequence
  Target HLA Sequence complement
tctgtgttcgtgtaggca

SEQ ID NO: 9250 - DNA, 18 bp, Artificial Sequence
  Target HLA Sequence complement
ctgtgttcgtgtaggcat

SEQ ID NO: 9251 - DNA, 18 bp, Artificial Sequence
  Target HLA Sequence complement
tgtgttcgtgtaggcata

SEQ ID NO: 9252 - DNA, 18 bp, Artificial Sequence
  Target HLA Sequence complement
gtgttcgtgtaggcataa

SEQ ID NO: 9253 - DNA, 18 bp, Artificial Sequence
  Target HLA Sequence complement
tgttcgtgtaggcataat

SEQ ID NO: 9254 - DNA, 18 bp, Artificial Sequence
  Target HLA Sequence complement
gttcgtgtaggcataatg

SEQ ID NO: 9255 - DNA, 18 bp, Artificial Sequence
  Target HLA Sequence complement
ttcgtgtaggcataatgt

SEQ ID NO: 9256 - DNA, 18 bp, Artificial Sequence
  Target HLA Sequence complement
tcgtgtaggcataatgtg

SEQ ID NO: 9257 - DNA, 18 bp, Artificial Sequence
  Target HLA Sequence complement
cgtgtaggcataatgtga

SEQ ID NO: 9258 - DNA, 18 bp, Artificial Sequence
  Target HLA Sequence complement
gtgtaggcataatgtgag

SEQ ID NO: 9259 - DNA, 18 bp, Artificial Sequence
  Target HLA Sequence complement
tgtaggcataatgtgagg

SEQ ID NO: 9260 - DNA, 18 bp, Artificial Sequence
  Target HLA Sequence complement
gtaggcataatgtgagga

SEQ ID NO: 9261 - DNA, 18 bp, Artificial Sequence
  Target HLA Sequence complement
taggcataatgtgaggag

SEQ ID NO: 9262 - DNA, 18 bp, Artificial Sequence
  Target HLA Sequence complement
aggcataatgtgaggagg

SEQ ID NO: 9263 - DNA, 18 bp, Artificial Sequence
  Target HLA Sequence complement
ggcataatgtgaggaggt

SEQ ID NO: 9264 - DNA, 18 bp, Artificial Sequence
  Target HLA Sequence complement
gcataatgtgaggaggtg

SEQ ID NO: 9265 - DNA, 18 bp, Artificial Sequence
  Target HLA Sequence complement
cataatgtgaggaggtgg

SEQ ID NO: 9266 - DNA, 18 bp, Artificial Sequence
  Target HLA Sequence complement
ataatgtgaggaggtggg

SEQ ID NO: 9267 - DNA, 18 bp, Artificial Sequence
  Target HLA Sequence complement
catgtccaccatgaccct

SEQ ID NO: 9268 - DNA, 18 bp, Artificial Sequence
  Target HLA Sequence complement
atgtccaccatgaccctc

SEQ ID NO: 9269 - DNA, 18 bp, Artificial Sequence
  Target HLA Sequence complement
tgtccaccatgaccctct

SEQ ID NO: 9270 - DNA, 18 bp, Artificial Sequence
  Target HLA Sequence complement
gtccaccatgaccctctt

SEQ ID NO: 9271 - DNA, 18 bp, Artificial Sequence
  Target HLA Sequence complement
tccaccatgaccctcttc

SEQ ID NO: 9272 - DNA, 18 bp, Artificial Sequence
  Target HLA Sequence complement
accatgaccctcttccca

SEQ ID NO: 9273 - DNA, 18 bp, Artificial Sequence
  Target HLA Sequence complement
cccaatcatctttcctgt

SEQ ID NO: 9274 - DNA, 18 bp, Artificial Sequence
  Target HLA Sequence complement
ccaatcatctttcctgtt

SEQ ID NO: 9275 - DNA, 18 bp, Artificial Sequence
  Target HLA Sequence complement
caatcatctttcctgttc

SEQ ID NO: 9276 - DNA, 18 bp, Artificial Sequence
  Target HLA Sequence complement
aatcatctttcctgttcc

SEQ ID NO: 9277 - DNA, 18 bp, Artificial Sequence
  Target HLA Sequence complement
atcatctttcctgttcca

SEQ ID NO: 9278 - DNA, 18 bp, Artificial Sequence
  Target HLA Sequence complement
tcatctttcctgttccag

SEQ ID NO: 9279 - DNA, 18 bp, Artificial Sequence
  Target HLA Sequence complement
catctttcctgttccaga

SEQ ID NO: 9280 - DNA, 18 bp, Artificial Sequence
  Target HLA Sequence complement
atctttcctgttccagag

SEQ ID NO: 9281 - DNA, 18 bp, Artificial Sequence
  Target HLA Sequence complement
tctttcctgttccagaga

SEQ ID NO: 9282 - DNA, 18 bp, Artificial Sequence
  Target HLA Sequence complement
ctttcctgttccagagag

SEQ ID NO: 9283 - DNA, 18 bp, Artificial Sequence
  Target HLA Sequence complement
tttcctgttccagagagg

SEQ ID NO: 9284 - DNA, 18 bp, Artificial Sequence
  Target HLA Sequence complement
ttcctgttccagagaggt

SEQ ID NO: 9285 - DNA, 18 bp, Artificial Sequence
  Target HLA Sequence complement
tcctgttccagagaggtg

SEQ ID NO: 9286 - DNA, 18 bp, Artificial Sequence
  Target HLA Sequence complement
gctgaggtgtctccatct

SEQ ID NO: 9287 - DNA, 18 bp, Artificial Sequence
  Target HLA Sequence complement
ctgaggtgtctccatctc

SEQ ID NO: 9288 - DNA, 18 bp, Artificial Sequence
  Target HLA Sequence complement
tgaggtgtctccatctct

SEQ ID NO: 9289 - DNA, 18 bp, Artificial Sequence
  Target HLA Sequence complement
gaggtgtctccatctctg

SEQ ID NO: 9290 - DNA, 18 bp, Artificial Sequence
  Target HLA Sequence complement
aggtgtctccatctctgt

SEQ ID NO: 9291 - DNA, 18 bp, Artificial Sequence
  Target HLA Sequence complement
ggtgtctccatctctgtc

SEQ ID NO: 9292 - DNA, 18 bp, Artificial Sequence
  Target HLA Sequence complement
gtgtctccatctctgtct

SEQ ID NO: 9293 - DNA, 18 bp, Artificial Sequence
  Target HLA Sequence complement
tgtctccatctctgtctc

SEQ ID NO: 9294 - DNA, 18 bp, Artificial Sequence
  Target HLA Sequence complement
gtctccatctctgtctca

SEQ ID NO: 9295 - DNA, 18 bp, Artificial Sequence
  Target HLA Sequence complement
tctccatctctgtctcaa

SEQ ID NO: 9296 - DNA, 18 bp, Artificial Sequence
  Target HLA Sequence complement
ctccatctctgtctcaac

SEQ ID NO: 9297 - DNA, 18 bp, Artificial Sequence
  Target HLA Sequence complement
tccatctctgtctcaact

SEQ ID NO: 9298 - DNA, 18 bp, Artificial Sequence
  Target HLA Sequence complement
ccatctctgtctcaactt

SEQ ID NO: 9299 - DNA, 18 bp, Artificial Sequence
  Target HLA Sequence complement
catctctgtctcaacttc

SEQ ID NO: 9300 - DNA, 18 bp, Artificial Sequence
  Target HLA Sequence complement
atctctgtctcaacttca

SEQ ID NO: 9301 - DNA, 18 bp, Artificial Sequence
  Target HLA Sequence complement
tctctgtctcaacttcat

SEQ ID NO: 9302 - DNA, 18 bp, Artificial Sequence
  Target HLA Sequence complement
ctctgtctcaacttcatg

SEQ ID NO: 9303 - DNA, 18 bp, Artificial Sequence
  Target HLA Sequence complement
tctgtctcaacttcatgg

SEQ ID NO: 9304 - DNA, 18 bp, Artificial Sequence
  Target HLA Sequence complement
ctgtctcaacttcatggt

SEQ ID NO: 9305 - DNA, 18 bp, Artificial Sequence
  Target HLA Sequence complement
tgtctcaacttcatggtg

SEQ ID NO: 9306 - DNA, 18 bp, Artificial Sequence
  Target HLA Sequence complement
gtctcaacttcatggtgc

SEQ ID NO: 9307 - DNA, 18 bp, Artificial Sequence
  Target HLA Sequence complement
tctcaacttcatggtgca

SEQ ID NO: 9308 - DNA, 18 bp, Artificial Sequence
  Target HLA Sequence complement
ctcaacttcatggtgcac

SEQ ID NO: 9309 - DNA, 18 bp, Artificial Sequence
  Target HLA Sequence complement
tcaacttcatggtgcact

SEQ ID NO: 9310 - DNA, 18 bp, Artificial Sequence
  Target HLA Sequence complement
caacttcatggtgcactg

SEQ ID NO: 9311 - DNA, 18 bp, Artificial Sequence
  Target HLA Sequence complement
aacttcatggtgcactga

SEQ ID NO: 9312 - DNA, 18 bp, Artificial Sequence
  Target HLA Sequence complement
acttcatggtgcactgag

SEQ ID NO: 9313 - DNA, 18 bp, Artificial Sequence
  Target HLA Sequence complement
cttcatggtgcactgagc

SEQ ID NO: 9314 - DNA, 18 bp, Artificial Sequence
  Target HLA Sequence complement
ttcatggtgcactgagct

SEQ ID NO: 9315 - DNA, 18 bp, Artificial Sequence
  Target HLA Sequence complement
tcatggtgcactgagctg

SEQ ID NO: 9316 - DNA, 18 bp, Artificial Sequence
  Target HLA Sequence complement
catggtgcactgagctgt

SEQ ID NO: 9317 - DNA, 18 bp, Artificial Sequence
  Target HLA Sequence complement
atggtgcactgagctgta

SEQ ID NO: 9318 - DNA, 18 bp, Artificial Sequence
  Target HLA Sequence complement
tggtgcactgagctgtaa

SEQ ID NO: 9319 - DNA, 18 bp, Artificial Sequence
  Target HLA Sequence complement
ggtgcactgagctgtaac

SEQ ID NO: 9320 - DNA, 18 bp, Artificial Sequence
  Target HLA Sequence complement
gtgcactgagctgtaact

SEQ ID NO: 9321 - DNA, 18 bp, Artificial Sequence
  Target HLA Sequence complement
tgcactgagctgtaactt

SEQ ID NO: 9322 - DNA, 18 bp, Artificial Sequence
  Target HLA Sequence complement
gcactgagctgtaacttc

SEQ ID NO: 9323 - DNA, 18 bp, Artificial Sequence
  Target HLA Sequence complement
cactgagctgtaacttct

SEQ ID NO: 9324 - DNA, 18 bp, Artificial Sequence
  Target HLA Sequence complement
actgagctgtaacttctt

SEQ ID NO: 9325 - DNA, 18 bp, Artificial Sequence
  Target HLA Sequence complement
ctgagctgtaacttcttc

SEQ ID NO: 9326 - DNA, 18 bp, Artificial Sequence
  Target HLA Sequence complement
tgagctgtaacttcttcc

SEQ ID NO: 9327 - DNA, 18 bp, Artificial Sequence
  Target HLA Sequence complement
gagctgtaacttcttcct

SEQ ID NO: 9328 - DNA, 18 bp, Artificial Sequence
  Target HLA Sequence complement
agctgtaacttcttcctt

SEQ ID NO: 9329 - DNA, 18 bp, Artificial Sequence
  Target HLA Sequence complement
gctgtaacttcttccttc

SEQ ID NO: 9330 - DNA, 18 bp, Artificial Sequence
  Target HLA Sequence complement
ctgtaacttcttccttcc

SEQ ID NO: 9331 - DNA, 18 bp, Artificial Sequence
  Target HLA Sequence complement
tgtaacttcttccttccc

SEQ ID NO: 9332 - DNA, 18 bp, Artificial Sequence
  Target HLA Sequence complement
gtaacttcttccttccct

SEQ ID NO: 9333 - DNA, 18 bp, Artificial Sequence
  Target HLA Sequence complement
taacttcttccttcccta

SEQ ID NO: 9334 - DNA, 18 bp, Artificial Sequence
  Target HLA Sequence complement
aacttcttccttccctat

SEQ ID NO: 9335 - DNA, 18 bp, Artificial Sequence
  Target HLA Sequence complement
acttcttccttccctatt

SEQ ID NO: 9336 - DNA, 18 bp, Artificial Sequence
  Target HLA Sequence complement
cttcttccttccctatta

SEQ ID NO: 9337 - DNA, 18 bp, Artificial Sequence
  Target HLA Sequence complement
ttcttccttccctattaa

SEQ ID NO: 9338 - DNA, 18 bp, Artificial Sequence
  Target HLA Sequence complement
tcttccttccctattaaa

SEQ ID NO: 9339 - DNA, 19 bp, Artificial Sequence
  Target HLA Sequence complement
ccgaaggcggtgtatggat

SEQ ID NO: 9340 - DNA, 19 bp, Artificial Sequence
  Target HLA Sequence complement
cgaaggcggtgtatggatt

SEQ ID NO: 9341 - DNA, 19 bp, Artificial Sequence
  Target HLA Sequence complement
gaaggcggtgtatggattg

SEQ ID NO: 9342 - DNA, 19 bp, Artificial Sequence
  Target HLA Sequence complement
aaggcggtgtatggattgg

SEQ ID NO: 9343 - DNA, 19 bp, Artificial Sequence
  Target HLA Sequence complement
aggcggtgtatggattggg

SEQ ID NO: 9344 - DNA, 19 bp, Artificial Sequence
  Target HLA Sequence complement
cccaactccgcagtttctt

SEQ ID NO: 9345 - DNA, 19 bp, Artificial Sequence
  Target HLA Sequence complement
ccaactccgcagtttcttt

SEQ ID NO: 9346 - DNA, 19 bp, Artificial Sequence
  Target HLA Sequence complement
tttctccctctcccaacct

SEQ ID NO: 9347 - DNA, 19 bp, Artificial Sequence
  Target HLA Sequence complement
ttctccctctcccaaccta

SEQ ID NO: 9348 - DNA, 19 bp, Artificial Sequence
  Target HLA Sequence complement
tctccctctcccaacctat

SEQ ID NO: 9349 - DNA, 19 bp, Artificial Sequence
  Target HLA Sequence complement
ctccctctcccaacctatg

SEQ ID NO: 9350 - DNA, 19 bp, Artificial Sequence
  Target HLA Sequence complement
tccctctcccaacctatgt

SEQ ID NO: 9351 - DNA, 19 bp, Artificial Sequence
  Target HLA Sequence complement
ccctctcccaacctatgta

SEQ ID NO: 9352 - DNA, 19 bp, Artificial Sequence
  Target HLA Sequence complement
cctctcccaacctatgtag

SEQ ID NO: 9353 - DNA, 19 bp, Artificial Sequence
  Target HLA Sequence complement
ctctcccaacctatgtagg

SEQ ID NO: 9354 - DNA, 19 bp, Artificial Sequence
  Target HLA Sequence complement
tctcccaacctatgtaggg

SEQ ID NO: 9355 - DNA, 19 bp, Artificial Sequence
  Target HLA Sequence complement
ctcccaacctatgtagggt

SEQ ID NO: 9356 - DNA, 19 bp, Artificial Sequence
  Target HLA Sequence complement
tcccaacctatgtagggtc

SEQ ID NO: 9357 - DNA, 19 bp, Artificial Sequence
  Target HLA Sequence complement
cccaacctatgtagggtcc

SEQ ID NO: 9358 - DNA, 19 bp, Artificial Sequence
  Target HLA Sequence complement
ccaacctatgtagggtcct

SEQ ID NO: 9359 - DNA, 19 bp, Artificial Sequence
  Target HLA Sequence complement
caacctatgtagggtcctt

SEQ ID NO: 9360 - DNA, 19 bp, Artificial Sequence
  Target HLA Sequence complement
aacctatgtagggtccttc

SEQ ID NO: 9361 - DNA, 19 bp, Artificial Sequence
  Target HLA Sequence complement
acctatgtagggtccttct

SEQ ID NO: 9362 - DNA, 19 bp, Artificial Sequence
  Target HLA Sequence complement
cctatgtagggtccttctt

SEQ ID NO: 9363 - DNA, 19 bp, Artificial Sequence
  Target HLA Sequence complement
ctatgtagggtccttcttc

SEQ ID NO: 9364 - DNA, 19 bp, Artificial Sequence
  Target HLA Sequence complement
tatgtagggtccttcttcc

SEQ ID NO: 9365 - DNA, 19 bp, Artificial Sequence
  Target HLA Sequence complement
atgtagggtccttcttcct

SEQ ID NO: 9366 - DNA, 19 bp, Artificial Sequence
  Target HLA Sequence complement
tgtagggtccttcttcctg

SEQ ID NO: 9367 - DNA, 19 bp, Artificial Sequence
  Target HLA Sequence complement
gtagggtccttcttcctgg

SEQ ID NO: 9368 - DNA, 19 bp, Artificial Sequence
  Target HLA Sequence complement
tagggtccttcttcctgga

SEQ ID NO: 9369 - DNA, 19 bp, Artificial Sequence
  Target HLA Sequence complement
agggtccttcttcctggat

SEQ ID NO: 9370 - DNA, 19 bp, Artificial Sequence
  Target HLA Sequence complement
gggtccttcttcctggata

SEQ ID NO: 9371 - DNA, 19 bp, Artificial Sequence
  Target HLA Sequence complement
ggtccttcttcctggatac

SEQ ID NO: 9372 - DNA, 19 bp, Artificial Sequence
  Target HLA Sequence complement
gtccttcttcctggatact

SEQ ID NO: 9373 - DNA, 19 bp, Artificial Sequence
  Target HLA Sequence complement
tccttcttcctggatactc

SEQ ID NO: 9374 - DNA, 19 bp, Artificial Sequence
  Target HLA Sequence complement
ccttcttcctggatactca

SEQ ID NO: 9375 - DNA, 19 bp, Artificial Sequence
  Target HLA Sequence complement
cttcttcctggatactcac

SEQ ID NO: 9376 - DNA, 19 bp, Artificial Sequence
  Target HLA Sequence complement
ttcttcctggatactcacg

SEQ ID NO: 9377 - DNA, 19 bp, Artificial Sequence
  Target HLA Sequence complement
tcttcctggatactcacga

SEQ ID NO: 9378 - DNA, 19 bp, Artificial Sequence
  Target HLA Sequence complement
cttcctggatactcacgac

SEQ ID NO: 9379 - DNA, 19 bp, Artificial Sequence
  Target HLA Sequence complement
ttcctggatactcacgacg

SEQ ID NO: 9380 - DNA, 19 bp, Artificial Sequence
  Target HLA Sequence complement
tcctggatactcacgacgc

SEQ ID NO: 9381 - DNA, 19 bp, Artificial Sequence
  Target HLA Sequence complement
tggatactcacgacgcgga

SEQ ID NO: 9382 - DNA, 19 bp, Artificial Sequence
  Target HLA Sequence complement
gacccagttctcactccca

SEQ ID NO: 9383 - DNA, 19 bp, Artificial Sequence
  Target HLA Sequence complement
acccagttctcactcccat

SEQ ID NO: 9384 - DNA, 19 bp, Artificial Sequence
  Target HLA Sequence complement
cccagttctcactcccatt

SEQ ID NO: 9385 - DNA, 19 bp, Artificial Sequence
  Target HLA Sequence complement
ccagttctcactcccattg

SEQ ID NO: 9386 - DNA, 19 bp, Artificial Sequence
  Target HLA Sequence complement
cagttctcactcccattgg

SEQ ID NO: 9387 - DNA, 19 bp, Artificial Sequence
  Target HLA Sequence complement
agttctcactcccattggg

SEQ ID NO: 9388 - DNA, 19 bp, Artificial Sequence
  Target HLA Sequence complement
gttctcactcccattgggt

SEQ ID NO: 9389 - DNA, 19 bp, Artificial Sequence
  Target HLA Sequence complement
ttctcactcccattgggtg

SEQ ID NO: 9390 - DNA, 19 bp, Artificial Sequence
  Target HLA Sequence complement
tctcactcccattgggtgt

SEQ ID NO: 9391 - DNA, 19 bp, Artificial Sequence
  Target HLA Sequence complement
ctcactcccattgggtgtc

SEQ ID NO: 9392 - DNA, 19 bp, Artificial Sequence
  Target HLA Sequence complement
tcactcccattgggtgtcg

SEQ ID NO: 9393 - DNA, 19 bp, Artificial Sequence
  Target HLA Sequence complement
tcccattgggtgtcgggtt

SEQ ID NO: 9394 - DNA, 19 bp, Artificial Sequence
  Target HLA Sequence complement
cccattgggtgtcgggttt

SEQ ID NO: 9395 - DNA, 19 bp, Artificial Sequence
  Target HLA Sequence complement
ccattgggtgtcgggtttc

SEQ ID NO: 9396 - DNA, 19 bp, Artificial Sequence
  Target HLA Sequence complement
cattgggtgtcgggtttcc

SEQ ID NO: 9397 - DNA, 19 bp, Artificial Sequence
  Target HLA Sequence complement
attgggtgtcgggtttcca

SEQ ID NO: 9398 - DNA, 19 bp, Artificial Sequence
  Target HLA Sequence complement
ttgggtgtcgggtttccag

SEQ ID NO: 9399 - DNA, 19 bp, Artificial Sequence
  Target HLA Sequence complement
tgggtgtcgggtttccaga

SEQ ID NO: 9400 - DNA, 19 bp, Artificial Sequence
  Target HLA Sequence complement
ggtgtcgggtttccagaga

SEQ ID NO: 9401 - DNA, 19 bp, Artificial Sequence
  Target HLA Sequence complement
gtgtcgggtttccagagaa

SEQ ID NO: 9402 - DNA, 19 bp, Artificial Sequence
  Target HLA Sequence complement
tgtcgggtttccagagaag

SEQ ID NO: 9403 - DNA, 19 bp, Artificial Sequence
  Target HLA Sequence complement
gtcgggtttccagagaagc

SEQ ID NO: 9404 - DNA, 19 bp, Artificial Sequence
  Target HLA Sequence complement
tcgggtttccagagaagcc

SEQ ID NO: 9405 - DNA, 19 bp, Artificial Sequence
  Target HLA Sequence complement
cgggtttccagagaagcca

SEQ ID NO: 9406 - DNA, 19 bp, Artificial Sequence
  Target HLA Sequence complement
gggtttccagagaagccaa

SEQ ID NO: 9407 - DNA, 19 bp, Artificial Sequence
  Target HLA Sequence complement
ggtttccagagaagccaat

SEQ ID NO: 9408 - DNA, 19 bp, Artificial Sequence
  Target HLA Sequence complement
gtttccagagaagccaatc

SEQ ID NO: 9409 - DNA, 19 bp, Artificial Sequence
  Target HLA Sequence complement
tttccagagaagccaatca

SEQ ID NO: 9410 - DNA, 19 bp, Artificial Sequence
  Target HLA Sequence complement
ttccagagaagccaatcag

SEQ ID NO: 9411 - DNA, 19 bp, Artificial Sequence
  Target HLA Sequence complement
tccagagaagccaatcagt

SEQ ID NO: 9412 - DNA, 19 bp, Artificial Sequence
  Target HLA Sequence complement
ccagagaagccaatcagtg

SEQ ID NO: 9413 - DNA, 19 bp, Artificial Sequence
  Target HLA Sequence complement
cagagaagccaatcagtgt

SEQ ID NO: 9414 - DNA, 19 bp, Artificial Sequence
  Target HLA Sequence complement
agagaagccaatcagtgtc

SEQ ID NO: 9415 - DNA, 19 bp, Artificial Sequence
  Target HLA Sequence complement
gagaagccaatcagtgtcg

SEQ ID NO: 9416 - DNA, 19 bp, Artificial Sequence
  Target HLA Sequence complement
agaagccaatcagtgtcgt

SEQ ID NO: 9417 - DNA, 19 bp, Artificial Sequence
  Target HLA Sequence complement
gaagccaatcagtgtcgtc

SEQ ID NO: 9418 - DNA, 19 bp, Artificial Sequence
  Target HLA Sequence complement
aagccaatcagtgtcgtcg

SEQ ID NO: 9419 - DNA, 19 bp, Artificial Sequence
  Target HLA Sequence complement
agccaatcagtgtcgtcgc

SEQ ID NO: 9420 - DNA, 19 bp, Artificial Sequence
  Target HLA Sequence complement
caatcagtgtcgtcgcggt

SEQ ID NO: 9421 - DNA, 19 bp, Artificial Sequence
  Target HLA Sequence complement
aatcagtgtcgtcgcggtc

SEQ ID NO: 9422 - DNA, 19 bp, Artificial Sequence
  Target HLA Sequence complement
tcgcggtcgcggttctaaa

SEQ ID NO: 9423 - DNA, 19 bp, Artificial Sequence
  Target HLA Sequence complement
gcggtcgcggttctaaagt

SEQ ID NO: 9424 - DNA, 19 bp, Artificial Sequence
  Target HLA Sequence complement
cggtcgcggttctaaagtc

SEQ ID NO: 9425 - DNA, 19 bp, Artificial Sequence
  Target HLA Sequence complement
ggtcgcggttctaaagtcc

SEQ ID NO: 9426 - DNA, 19 bp, Artificial Sequence
  Target HLA Sequence complement
gtcgcggttctaaagtccg

SEQ ID NO: 9427 - DNA, 19 bp, Artificial Sequence
  Target HLA Sequence complement
tcgcggttctaaagtccgc

SEQ ID NO: 9428 - DNA, 19 bp, Artificial Sequence
  Target HLA Sequence complement
cgcggttctaaagtccgca

SEQ ID NO: 9429 - DNA, 19 bp, Artificial Sequence
  Target HLA Sequence complement
gcggttctaaagtccgcac

SEQ ID NO: 9430 - DNA, 19 bp, Artificial Sequence
  Target HLA Sequence complement
cggttctaaagtccgcacg

SEQ ID NO: 9431 - DNA, 19 bp, Artificial Sequence
  Target HLA Sequence complement
ggttctaaagtccgcacgc

SEQ ID NO: 9432 - DNA, 19 bp, Artificial Sequence
  Target HLA Sequence complement
gttctaaagtccgcacgca

SEQ ID NO: 9433 - DNA, 19 bp, Artificial Sequence
  Target HLA Sequence complement
ttctaaagtccgcacgcac

SEQ ID NO: 9434 - DNA, 19 bp, Artificial Sequence
  Target HLA Sequence complement
tctaaagtccgcacgcacc

SEQ ID NO: 9435 - DNA, 19 bp, Artificial Sequence
  Target HLA Sequence complement
taaagtccgcacgcaccca

SEQ ID NO: 9436 - DNA, 19 bp, Artificial Sequence
  Target HLA Sequence complement
acccaccgggactcagatt

SEQ ID NO: 9437 - DNA, 19 bp, Artificial Sequence
  Target HLA Sequence complement
ccaccgggactcagattct

SEQ ID NO: 9438 - DNA, 19 bp, Artificial Sequence
  Target HLA Sequence complement
caccgggactcagattctc

SEQ ID NO: 9439 - DNA, 19 bp, Artificial Sequence
  Target HLA Sequence complement
accgggactcagattctcc

SEQ ID NO: 9440 - DNA, 19 bp, Artificial Sequence
  Target HLA Sequence complement
gaaccctcgtcctgctact

SEQ ID NO: 9441 - DNA, 19 bp, Artificial Sequence
  Target HLA Sequence complement
aaccctcgtcctgctactc

SEQ ID NO: 9442 - DNA, 19 bp, Artificial Sequence
  Target HLA Sequence complement
accctcgtcctgctactct

SEQ ID NO: 9443 - DNA, 19 bp, Artificial Sequence
  Target HLA Sequence complement
ggctctcactccatgaggt

SEQ ID NO: 9444 - DNA, 19 bp, Artificial Sequence
  Target HLA Sequence complement
gctctcactccatgaggta

SEQ ID NO: 9445 - DNA, 19 bp, Artificial Sequence
  Target HLA Sequence complement
ctctcactccatgaggtat

SEQ ID NO: 9446 - DNA, 19 bp, Artificial Sequence
  Target HLA Sequence complement
tctcactccatgaggtatt

SEQ ID NO: 9447 - DNA, 19 bp, Artificial Sequence
  Target HLA Sequence complement
ctcactccatgaggtattt

SEQ ID NO: 9448 - DNA, 19 bp, Artificial Sequence
  Target HLA Sequence complement
tcactccatgaggtatttc

SEQ ID NO: 9449 - DNA, 19 bp, Artificial Sequence
  Target HLA Sequence complement
cactccatgaggtatttct

SEQ ID NO: 9450 - DNA, 19 bp, Artificial Sequence
  Target HLA Sequence complement
actccatgaggtatttctt

SEQ ID NO: 9451 - DNA, 19 bp, Artificial Sequence
  Target HLA Sequence complement
ctccatgaggtatttcttc

SEQ ID NO: 9452 - DNA, 19 bp, Artificial Sequence
  Target HLA Sequence complement
tccatgaggtatttcttca

SEQ ID NO: 9453 - DNA, 19 bp, Artificial Sequence
  Target HLA Sequence complement
ccatgaggtatttcttcac

SEQ ID NO: 9454 - DNA, 19 bp, Artificial Sequence
  Target HLA Sequence complement
catgaggtatttcttcaca

SEQ ID NO: 9455 - DNA, 19 bp, Artificial Sequence
  Target HLA Sequence complement
atgaggtatttcttcacat

SEQ ID NO: 9456 - DNA, 19 bp, Artificial Sequence
  Target HLA Sequence complement
tgaggtatttcttcacatc

SEQ ID NO: 9457 - DNA, 19 bp, Artificial Sequence
  Target HLA Sequence complement
gaggtatttcttcacatcc

SEQ ID NO: 9458 - DNA, 19 bp, Artificial Sequence
  Target HLA Sequence complement
aggtatttcttcacatccg

SEQ ID NO: 9459 - DNA, 19 bp, Artificial Sequence
  Target HLA Sequence complement
ggtatttcttcacatccgt

SEQ ID NO: 9460 - DNA, 19 bp, Artificial Sequence
  Target HLA Sequence complement
gtatttcttcacatccgtg

SEQ ID NO: 9461 - DNA, 19 bp, Artificial Sequence
  Target HLA Sequence complement
tatttcttcacatccgtgt

SEQ ID NO: 9462 - DNA, 19 bp, Artificial Sequence
  Target HLA Sequence complement
atttcttcacatccgtgtc

SEQ ID NO: 9463 - DNA, 19 bp, Artificial Sequence
  Target HLA Sequence complement
tttcttcacatccgtgtcc

SEQ ID NO: 9464 - DNA, 19 bp, Artificial Sequence
  Target HLA Sequence complement
ttcttcacatccgtgtccc

SEQ ID NO: 9465 - DNA, 19 bp, Artificial Sequence
  Target HLA Sequence complement
tcttcacatccgtgtcccg

SEQ ID NO: 9466 - DNA, 19 bp, Artificial Sequence
  Target HLA Sequence complement
gcttcatcgcagtgggcta

SEQ ID NO: 9467 - DNA, 19 bp, Artificial Sequence
  Target HLA Sequence complement
cttcatcgcagtgggctac

SEQ ID NO: 9468 - DNA, 19 bp, Artificial Sequence
  Target HLA Sequence complement
ttcatcgcagtgggctacg

SEQ ID NO: 9469 - DNA, 19 bp, Artificial Sequence
  Target HLA Sequence complement
tcatcgcagtgggctacgt

SEQ ID NO: 9470 - DNA, 19 bp, Artificial Sequence
  Target HLA Sequence complement
tacgtggacgacacgcagt

SEQ ID NO: 9471 - DNA, 19 bp, Artificial Sequence
  Target HLA Sequence complement
acgtggacgacacgcagtt

SEQ ID NO: 9472 - DNA, 19 bp, Artificial Sequence
  Target HLA Sequence complement
tggacgacacgcagttcgt

SEQ ID NO: 9473 - DNA, 19 bp, Artificial Sequence
  Target HLA Sequence complement
acacgcagttcgtgcggtt

SEQ ID NO: 9474 - DNA, 19 bp, Artificial Sequence
  Target HLA Sequence complement
cagttcgtgcggttcgaca

SEQ ID NO: 9475 - DNA, 19 bp, Artificial Sequence
  Target HLA Sequence complement
agttcgtgcggttcgacag

SEQ ID NO: 9476 - DNA, 19 bp, Artificial Sequence
  Target HLA Sequence complement
gtggatagagcaggagggt

SEQ ID NO: 9477 - DNA, 19 bp, Artificial Sequence
  Target HLA Sequence complement
tggatagagcaggagggtc

SEQ ID NO: 9478 - DNA, 19 bp, Artificial Sequence
  Target HLA Sequence complement
caggagggtccggagtatt

SEQ ID NO: 9479 - DNA, 19 bp, Artificial Sequence
  Target HLA Sequence complement
aggagggtccggagtattg

SEQ ID NO: 9480 - DNA, 19 bp, Artificial Sequence
  Target HLA Sequence complement
agggtccggagtattggga

SEQ ID NO: 9481 - DNA, 19 bp, Artificial Sequence
  Target HLA Sequence complement
ggagacacggaaagtgaag

SEQ ID NO: 9482 - DNA, 19 bp, Artificial Sequence
  Target HLA Sequence complement
gagacacggaaagtgaagg

SEQ ID NO: 9483 - DNA, 19 bp, Artificial Sequence
  Target HLA Sequence complement
agacacggaaagtgaaggc

SEQ ID NO: 9484 - DNA, 19 bp, Artificial Sequence
  Target HLA Sequence complement
gacacggaaagtgaaggcc

SEQ ID NO: 9485 - DNA, 19 bp, Artificial Sequence
  Target HLA Sequence complement
acacggaaagtgaaggccc

SEQ ID NO: 9486 - DNA, 19 bp, Artificial Sequence
  Target HLA Sequence complement
cacggaaagtgaaggccca

SEQ ID NO: 9487 - DNA, 19 bp, Artificial Sequence
  Target HLA Sequence complement
acggaaagtgaaggcccac

SEQ ID NO: 9488 - DNA, 19 bp, Artificial Sequence
  Target HLA Sequence complement
cggaaagtgaaggcccact

SEQ ID NO: 9489 - DNA, 19 bp, Artificial Sequence
  Target HLA Sequence complement
ggaaagtgaaggcccactc

SEQ ID NO: 9490 - DNA, 19 bp, Artificial Sequence
  Target HLA Sequence complement
aaagtgaaggcccactcac

SEQ ID NO: 9491 - DNA, 19 bp, Artificial Sequence
  Target HLA Sequence complement
aagtgaaggcccactcaca

SEQ ID NO: 9492 - DNA, 19 bp, Artificial Sequence
  Target HLA Sequence complement
agtgaaggcccactcacag

SEQ ID NO: 9493 - DNA, 19 bp, Artificial Sequence
  Target HLA Sequence complement
gtgaaggcccactcacaga

SEQ ID NO: 9494 - DNA, 19 bp, Artificial Sequence
  Target HLA Sequence complement
tgaaggcccactcacagac

SEQ ID NO: 9495 - DNA, 19 bp, Artificial Sequence
  Target HLA Sequence complement
gaaggcccactcacagact

SEQ ID NO: 9496 - DNA, 19 bp, Artificial Sequence
  Target HLA Sequence complement
aaggcccactcacagactc

SEQ ID NO: 9497 - DNA, 19 bp, Artificial Sequence
  Target HLA Sequence complement
aggcccactcacagactca

SEQ ID NO: 9498 - DNA, 19 bp, Artificial Sequence
  Target HLA Sequence complement
ccactcacagactcaccga

SEQ ID NO: 9499 - DNA, 19 bp, Artificial Sequence
  Target HLA Sequence complement
cactcacagactcaccgag

SEQ ID NO: 9500 - DNA, 19 bp, Artificial Sequence
  Target HLA Sequence complement
actcacagactcaccgagt

SEQ ID NO: 9501 - DNA, 19 bp, Artificial Sequence
  Target HLA Sequence complement
ctcacagactcaccgagtg

SEQ ID NO: 9502 - DNA, 19 bp, Artificial Sequence
  Target HLA Sequence complement
tcacagactcaccgagtgg

SEQ ID NO: 9503 - DNA, 19 bp, Artificial Sequence
  Target HLA Sequence complement
cacagactcaccgagtgga

SEQ ID NO: 9504 - DNA, 19 bp, Artificial Sequence
  Target HLA Sequence complement
acagactcaccgagtggac

SEQ ID NO: 9505 - DNA, 19 bp, Artificial Sequence
  Target HLA Sequence complement
agactcaccgagtggacct

SEQ ID NO: 9506 - DNA, 19 bp, Artificial Sequence
  Target HLA Sequence complement
cgcggctactacaaccaga

SEQ ID NO: 9507 - DNA, 19 bp, Artificial Sequence
  Target HLA Sequence complement
gcggctactacaaccagag

SEQ ID NO: 9508 - DNA, 19 bp, Artificial Sequence
  Target HLA Sequence complement
cggctactacaaccagagc

SEQ ID NO: 9509 - DNA, 19 bp, Artificial Sequence
  Target HLA Sequence complement
ggctactacaaccagagcg

SEQ ID NO: 9510 - DNA, 19 bp, Artificial Sequence
  Target HLA Sequence complement
gctactacaaccagagcga

SEQ ID NO: 9511 - DNA, 19 bp, Artificial Sequence
  Target HLA Sequence complement
ctactacaaccagagcgag

SEQ ID NO: 9512 - DNA, 19 bp, Artificial Sequence
  Target HLA Sequence complement
tactacaaccagagcgagg

SEQ ID NO: 9513 - DNA, 19 bp, Artificial Sequence
  Target HLA Sequence complement
actacaaccagagcgaggc

SEQ ID NO: 9514 - DNA, 19 bp, Artificial Sequence
  Target HLA Sequence complement
ggttctcacaccgtccaga

SEQ ID NO: 9515 - DNA, 19 bp, Artificial Sequence
  Target HLA Sequence complement
gttctcacaccgtccagag

SEQ ID NO: 9516 - DNA, 19 bp, Artificial Sequence
  Target HLA Sequence complement
ttctcacaccgtccagagg

SEQ ID NO: 9517 - DNA, 19 bp, Artificial Sequence
  Target HLA Sequence complement
tctcacaccgtccagagga

SEQ ID NO: 9518 - DNA, 19 bp, Artificial Sequence
  Target HLA Sequence complement
ctcacaccgtccagaggat

SEQ ID NO: 9519 - DNA, 19 bp, Artificial Sequence
  Target HLA Sequence complement
tcacaccgtccagaggatg

SEQ ID NO: 9520 - DNA, 19 bp, Artificial Sequence
  Target HLA Sequence complement
cacaccgtccagaggatgt

SEQ ID NO: 9521 - DNA, 19 bp, Artificial Sequence
  Target HLA Sequence complement
acaccgtccagaggatgta

SEQ ID NO: 9522 - DNA, 19 bp, Artificial Sequence
  Target HLA Sequence complement
caccgtccagaggatgtat

SEQ ID NO: 9523 - DNA, 19 bp, Artificial Sequence
  Target HLA Sequence complement
accgtccagaggatgtatg

SEQ ID NO: 9524 - DNA, 19 bp, Artificial Sequence
  Target HLA Sequence complement
ccgtccagaggatgtatgg

SEQ ID NO: 9525 - DNA, 19 bp, Artificial Sequence
  Target HLA Sequence complement
cgtccagaggatgtatggc

SEQ ID NO: 9526 - DNA, 19 bp, Artificial Sequence
  Target HLA Sequence complement
gtccagaggatgtatggct

SEQ ID NO: 9527 - DNA, 19 bp, Artificial Sequence
  Target HLA Sequence complement
tccagaggatgtatggctg

SEQ ID NO: 9528 - DNA, 19 bp, Artificial Sequence
  Target HLA Sequence complement
ccagaggatgtatggctgc

SEQ ID NO: 9529 - DNA, 19 bp, Artificial Sequence
  Target HLA Sequence complement
cagaggatgtatggctgcg

SEQ ID NO: 9530 - DNA, 19 bp, Artificial Sequence
  Target HLA Sequence complement
agaggatgtatggctgcga

SEQ ID NO: 9531 - DNA, 19 bp, Artificial Sequence
  Target HLA Sequence complement
gaggatgtatggctgcgac

SEQ ID NO: 9532 - DNA, 19 bp, Artificial Sequence
  Target HLA Sequence complement
aggatgtatggctgcgacg

SEQ ID NO: 9533 - DNA, 19 bp, Artificial Sequence
  Target HLA Sequence complement
ggatgtatggctgcgacgt

SEQ ID NO: 9534 - DNA, 19 bp, Artificial Sequence
  Target HLA Sequence complement
gatgtatggctgcgacgtg

SEQ ID NO: 9535 - DNA, 19 bp, Artificial Sequence
  Target HLA Sequence complement
atgtatggctgcgacgtgg

SEQ ID NO: 9536 - DNA, 19 bp, Artificial Sequence
  Target HLA Sequence complement
ggtaccaccagtacgccta

SEQ ID NO: 9537 - DNA, 19 bp, Artificial Sequence
  Target HLA Sequence complement
gtaccaccagtacgcctac

SEQ ID NO: 9538 - DNA, 19 bp, Artificial Sequence
  Target HLA Sequence complement
taccaccagtacgcctacg

SEQ ID NO: 9539 - DNA, 19 bp, Artificial Sequence
  Target HLA Sequence complement
accaccagtacgcctacga

SEQ ID NO: 9540 - DNA, 19 bp, Artificial Sequence
  Target HLA Sequence complement
agtacgcctacgacggcaa

SEQ ID NO: 9541 - DNA, 19 bp, Artificial Sequence
  Target HLA Sequence complement
gcctacgacggcaaggatt

SEQ ID NO: 9542 - DNA, 19 bp, Artificial Sequence
  Target HLA Sequence complement
cctacgacggcaaggatta

SEQ ID NO: 9543 - DNA, 19 bp, Artificial Sequence
  Target HLA Sequence complement
ctacgacggcaaggattac

SEQ ID NO: 9544 - DNA, 19 bp, Artificial Sequence
  Target HLA Sequence complement
tacgacggcaaggattaca

SEQ ID NO: 9545 - DNA, 19 bp, Artificial Sequence
  Target HLA Sequence complement
acgacggcaaggattacat

SEQ ID NO: 9546 - DNA, 19 bp, Artificial Sequence
  Target HLA Sequence complement
cgacggcaaggattacatc

SEQ ID NO: 9547 - DNA, 19 bp, Artificial Sequence
  Target HLA Sequence complement
gacggcaaggattacatcg

SEQ ID NO: 9548 - DNA, 19 bp, Artificial Sequence
  Target HLA Sequence complement
acggcaaggattacatcgc

SEQ ID NO: 9549 - DNA, 19 bp, Artificial Sequence
  Target HLA Sequence complement
cggcaaggattacatcgcc

SEQ ID NO: 9550 - DNA, 19 bp, Artificial Sequence
  Target HLA Sequence complement
ggcaaggattacatcgccc

SEQ ID NO: 9551 - DNA, 19 bp, Artificial Sequence
  Target HLA Sequence complement
gcaaggattacatcgccct

SEQ ID NO: 9552 - DNA, 19 bp, Artificial Sequence
  Target HLA Sequence complement
caaggattacatcgccctg

SEQ ID NO: 9553 - DNA, 19 bp, Artificial Sequence
  Target HLA Sequence complement
aaggattacatcgccctga

SEQ ID NO: 9554 - DNA, 19 bp, Artificial Sequence
  Target HLA Sequence complement
aggattacatcgccctgaa

SEQ ID NO: 9555 - DNA, 19 bp, Artificial Sequence
  Target HLA Sequence complement
ggattacatcgccctgaaa

SEQ ID NO: 9556 - DNA, 19 bp, Artificial Sequence
  Target HLA Sequence complement
gattacatcgccctgaaag

SEQ ID NO: 9557 - DNA, 19 bp, Artificial Sequence
  Target HLA Sequence complement
attacatcgccctgaaaga

SEQ ID NO: 9558 - DNA, 19 bp, Artificial Sequence
  Target HLA Sequence complement
ttacatcgccctgaaagag

SEQ ID NO: 9559 - DNA, 19 bp, Artificial Sequence
  Target HLA Sequence complement
tacatcgccctgaaagagg

SEQ ID NO: 9560 - DNA, 19 bp, Artificial Sequence
  Target HLA Sequence complement
acatcgccctgaaagagga

SEQ ID NO: 9561 - DNA, 19 bp, Artificial Sequence
  Target HLA Sequence complement
catcgccctgaaagaggac

SEQ ID NO: 9562 - DNA, 19 bp, Artificial Sequence
  Target HLA Sequence complement
atcgccctgaaagaggacc

SEQ ID NO: 9563 - DNA, 19 bp, Artificial Sequence
  Target HLA Sequence complement
tcgccctgaaagaggacct

SEQ ID NO: 9564 - DNA, 19 bp, Artificial Sequence
  Target HLA Sequence complement
ctgaaagaggacctgcgct

SEQ ID NO: 9565 - DNA, 19 bp, Artificial Sequence
  Target HLA Sequence complement
tgaaagaggacctgcgctc

SEQ ID NO: 9566 - DNA, 19 bp, Artificial Sequence
  Target HLA Sequence complement
gaaagaggacctgcgctct

SEQ ID NO: 9567 - DNA, 19 bp, Artificial Sequence
  Target HLA Sequence complement
aaagaggacctgcgctctt

SEQ ID NO: 9568 - DNA, 19 bp, Artificial Sequence
  Target HLA Sequence complement
aagaggacctgcgctcttg

SEQ ID NO: 9569 - DNA, 19 bp, Artificial Sequence
  Target HLA Sequence complement
gacatggcagctcagacca

SEQ ID NO: 9570 - DNA, 19 bp, Artificial Sequence
  Target HLA Sequence complement
acatggcagctcagaccac

SEQ ID NO: 9571 - DNA, 19 bp, Artificial Sequence
  Target HLA Sequence complement
atggcagctcagaccacca

SEQ ID NO: 9572 - DNA, 19 bp, Artificial Sequence
  Target HLA Sequence complement
tggcagctcagaccaccaa

SEQ ID NO: 9573 - DNA, 19 bp, Artificial Sequence
  Target HLA Sequence complement
cagctcagaccaccaagca

SEQ ID NO: 9574 - DNA, 19 bp, Artificial Sequence
  Target HLA Sequence complement
agctcagaccaccaagcac

SEQ ID NO: 9575 - DNA, 19 bp, Artificial Sequence
  Target HLA Sequence complement
gctcagaccaccaagcaca

SEQ ID NO: 9576 - DNA, 19 bp, Artificial Sequence
  Target HLA Sequence complement
ctcagaccaccaagcacaa

SEQ ID NO: 9577 - DNA, 19 bp, Artificial Sequence
  Target HLA Sequence complement
tcagaccaccaagcacaag

SEQ ID NO: 9578 - DNA, 19 bp, Artificial Sequence
  Target HLA Sequence complement
cagaccaccaagcacaagt

SEQ ID NO: 9579 - DNA, 19 bp, Artificial Sequence
  Target HLA Sequence complement
agaccaccaagcacaagtg

SEQ ID NO: 9580 - DNA, 19 bp, Artificial Sequence
  Target HLA Sequence complement
gaccaccaagcacaagtgg

SEQ ID NO: 9581 - DNA, 19 bp, Artificial Sequence
  Target HLA Sequence complement
accaccaagcacaagtggg

SEQ ID NO: 9582 - DNA, 19 bp, Artificial Sequence
  Target HLA Sequence complement
ccaccaagcacaagtggga

SEQ ID NO: 9583 - DNA, 19 bp, Artificial Sequence
  Target HLA Sequence complement
caccaagcacaagtgggag

SEQ ID NO: 9584 - DNA, 19 bp, Artificial Sequence
  Target HLA Sequence complement
accaagcacaagtgggagg

SEQ ID NO: 9585 - DNA, 19 bp, Artificial Sequence
  Target HLA Sequence complement
catgtggcggagcagttga

SEQ ID NO: 9586 - DNA, 19 bp, Artificial Sequence
  Target HLA Sequence complement
atgtggcggagcagttgag

SEQ ID NO: 9587 - DNA, 19 bp, Artificial Sequence
  Target HLA Sequence complement
tgtggcggagcagttgaga

SEQ ID NO: 9588 - DNA, 19 bp, Artificial Sequence
  Target HLA Sequence complement
cggagcagttgagagccta

SEQ ID NO: 9589 - DNA, 19 bp, Artificial Sequence
  Target HLA Sequence complement
ggagcagttgagagcctac

SEQ ID NO: 9590 - DNA, 19 bp, Artificial Sequence
  Target HLA Sequence complement
gagcagttgagagcctacc

SEQ ID NO: 9591 - DNA, 19 bp, Artificial Sequence
  Target HLA Sequence complement
agcagttgagagcctacct

SEQ ID NO: 9592 - DNA, 19 bp, Artificial Sequence
  Target HLA Sequence complement
gcagttgagagcctacctg

SEQ ID NO: 9593 - DNA, 19 bp, Artificial Sequence
  Target HLA Sequence complement
cagttgagagcctacctgg

SEQ ID NO: 9594 - DNA, 19 bp, Artificial Sequence
  Target HLA Sequence complement
agttgagagcctacctgga

SEQ ID NO: 9595 - DNA, 19 bp, Artificial Sequence
  Target HLA Sequence complement
gttgagagcctacctggag

SEQ ID NO: 9596 - DNA, 19 bp, Artificial Sequence
  Target HLA Sequence complement
ttgagagcctacctggagg

SEQ ID NO: 9597 - DNA, 19 bp, Artificial Sequence
  Target HLA Sequence complement
tggagtggctccgcagata

SEQ ID NO: 9598 - DNA, 19 bp, Artificial Sequence
  Target HLA Sequence complement
agtggctccgcagatacct

SEQ ID NO: 9599 - DNA, 19 bp, Artificial Sequence
  Target HLA Sequence complement
ctccgcagatacctggaga

SEQ ID NO: 9600 - DNA, 19 bp, Artificial Sequence
  Target HLA Sequence complement
tccgcagatacctggagaa

SEQ ID NO: 9601 - DNA, 19 bp, Artificial Sequence
  Target HLA Sequence complement
ccgcagatacctggagaac

SEQ ID NO: 9602 - DNA, 19 bp, Artificial Sequence
  Target HLA Sequence complement
cgcagatacctggagaacg

SEQ ID NO: 9603 - DNA, 19 bp, Artificial Sequence
  Target HLA Sequence complement
gcagatacctggagaacgg

SEQ ID NO: 9604 - DNA, 19 bp, Artificial Sequence
  Target HLA Sequence complement
cagatacctggagaacggg

SEQ ID NO: 9605 - DNA, 19 bp, Artificial Sequence
  Target HLA Sequence complement
agatacctggagaacggga

SEQ ID NO: 9606 - DNA, 19 bp, Artificial Sequence
  Target HLA Sequence complement
gatacctggagaacgggaa

SEQ ID NO: 9607 - DNA, 19 bp, Artificial Sequence
  Target HLA Sequence complement
atacctggagaacgggaag

SEQ ID NO: 9608 - DNA, 19 bp, Artificial Sequence
  Target HLA Sequence complement
tacctggagaacgggaagg

SEQ ID NO: 9609 - DNA, 19 bp, Artificial Sequence
  Target HLA Sequence complement
acctggagaacgggaagga

SEQ ID NO: 9610 - DNA, 19 bp, Artificial Sequence
  Target HLA Sequence complement
ctggagaacgggaaggaga

SEQ ID NO: 9611 - DNA, 19 bp, Artificial Sequence
  Target HLA Sequence complement
tggagaacgggaaggagac

SEQ ID NO: 9612 - DNA, 19 bp, Artificial Sequence
  Target HLA Sequence complement
agaacgggaaggagacgct

SEQ ID NO: 9613 - DNA, 19 bp, Artificial Sequence
  Target HLA Sequence complement
aaacgcatatgactcacca

SEQ ID NO: 9614 - DNA, 19 bp, Artificial Sequence
  Target HLA Sequence complement
aacgcatatgactcaccac

SEQ ID NO: 9615 - DNA, 19 bp, Artificial Sequence
  Target HLA Sequence complement
cgcatatgactcaccacgc

SEQ ID NO: 9616 - DNA, 19 bp, Artificial Sequence
  Target HLA Sequence complement
gcatatgactcaccacgct

SEQ ID NO: 9617 - DNA, 19 bp, Artificial Sequence
  Target HLA Sequence complement
catatgactcaccacgctg

SEQ ID NO: 9618 - DNA, 19 bp, Artificial Sequence
  Target HLA Sequence complement
atatgactcaccacgctgt

SEQ ID NO: 9619 - DNA, 19 bp, Artificial Sequence
  Target HLA Sequence complement
tatgactcaccacgctgtc

SEQ ID NO: 9620 - DNA, 19 bp, Artificial Sequence
  Target HLA Sequence complement
atgactcaccacgctgtct

SEQ ID NO: 9621 - DNA, 19 bp, Artificial Sequence
  Target HLA Sequence complement
tgactcaccacgctgtctc

SEQ ID NO: 9622 - DNA, 19 bp, Artificial Sequence
  Target HLA Sequence complement
gactcaccacgctgtctct

SEQ ID NO: 9623 - DNA, 19 bp, Artificial Sequence
  Target HLA Sequence complement
actcaccacgctgtctctg

SEQ ID NO: 9624 - DNA, 19 bp, Artificial Sequence
  Target HLA Sequence complement
ctcaccacgctgtctctga

SEQ ID NO: 9625 - DNA, 19 bp, Artificial Sequence
  Target HLA Sequence complement
tcaccacgctgtctctgac

SEQ ID NO: 9626 - DNA, 19 bp, Artificial Sequence
  Target HLA Sequence complement
accacgctgtctctgacca

SEQ ID NO: 9627 - DNA, 19 bp, Artificial Sequence
  Target HLA Sequence complement
ccacgctgtctctgaccat

SEQ ID NO: 9628 - DNA, 19 bp, Artificial Sequence
  Target HLA Sequence complement
cacgctgtctctgaccatg

SEQ ID NO: 9629 - DNA, 19 bp, Artificial Sequence
  Target HLA Sequence complement
acgctgtctctgaccatga

SEQ ID NO: 9630 - DNA, 19 bp, Artificial Sequence
  Target HLA Sequence complement
cgctgtctctgaccatgaa

SEQ ID NO: 9631 - DNA, 19 bp, Artificial Sequence
  Target HLA Sequence complement
gctgtctctgaccatgaag

SEQ ID NO: 9632 - DNA, 19 bp, Artificial Sequence
  Target HLA Sequence complement
ctgtctctgaccatgaagc

SEQ ID NO: 9633 - DNA, 19 bp, Artificial Sequence
  Target HLA Sequence complement
tgtctctgaccatgaagcc

SEQ ID NO: 9634 - DNA, 19 bp, Artificial Sequence
  Target HLA Sequence complement
gtctctgaccatgaagcca

SEQ ID NO: 9635 - DNA, 19 bp, Artificial Sequence
  Target HLA Sequence complement
tctctgaccatgaagccac

SEQ ID NO: 9636 - DNA, 19 bp, Artificial Sequence
  Target HLA Sequence complement
ctctgaccatgaagccacc

SEQ ID NO: 9637 - DNA, 19 bp, Artificial Sequence
  Target HLA Sequence complement
tctgaccatgaagccaccc

SEQ ID NO: 9638 - DNA, 19 bp, Artificial Sequence
  Target HLA Sequence complement
ctgaccatgaagccaccct

SEQ ID NO: 9639 - DNA, 19 bp, Artificial Sequence
  Target HLA Sequence complement
tgaccatgaagccaccctg

SEQ ID NO: 9640 - DNA, 19 bp, Artificial Sequence
  Target HLA Sequence complement
gaccatgaagccaccctga

SEQ ID NO: 9641 - DNA, 19 bp, Artificial Sequence
  Target HLA Sequence complement
accatgaagccaccctgag

SEQ ID NO: 9642 - DNA, 19 bp, Artificial Sequence
  Target HLA Sequence complement
catgaagccaccctgaggt

SEQ ID NO: 9643 - DNA, 19 bp, Artificial Sequence
  Target HLA Sequence complement
atgaagccaccctgaggtg

SEQ ID NO: 9644 - DNA, 19 bp, Artificial Sequence
  Target HLA Sequence complement
tgagcttctaccctgcgga

SEQ ID NO: 9645 - DNA, 19 bp, Artificial Sequence
  Target HLA Sequence complement
agcttctaccctgcggaga

SEQ ID NO: 9646 - DNA, 19 bp, Artificial Sequence
  Target HLA Sequence complement
gcttctaccctgcggagat

SEQ ID NO: 9647 - DNA, 19 bp, Artificial Sequence
  Target HLA Sequence complement
cttctaccctgcggagatc

SEQ ID NO: 9648 - DNA, 19 bp, Artificial Sequence
  Target HLA Sequence complement
ttctaccctgcggagatca

SEQ ID NO: 9649 - DNA, 19 bp, Artificial Sequence
  Target HLA Sequence complement
tctaccctgcggagatcac

SEQ ID NO: 9650 - DNA, 19 bp, Artificial Sequence
  Target HLA Sequence complement
ctaccctgcggagatcaca

SEQ ID NO: 9651 - DNA, 19 bp, Artificial Sequence
  Target HLA Sequence complement
taccctgcggagatcacac

SEQ ID NO: 9652 - DNA, 19 bp, Artificial Sequence
  Target HLA Sequence complement
accctgcggagatcacact

SEQ ID NO: 9653 - DNA, 19 bp, Artificial Sequence
  Target HLA Sequence complement
cctgcggagatcacactga

SEQ ID NO: 9654 - DNA, 19 bp, Artificial Sequence
  Target HLA Sequence complement
ctgcggagatcacactgac

SEQ ID NO: 9655 - DNA, 19 bp, Artificial Sequence
  Target HLA Sequence complement
tgcggagatcacactgacc

SEQ ID NO: 9656 - DNA, 19 bp, Artificial Sequence
  Target HLA Sequence complement
gcggagatcacactgacct

SEQ ID NO: 9657 - DNA, 19 bp, Artificial Sequence
  Target HLA Sequence complement
cggagatcacactgacctg

SEQ ID NO: 9658 - DNA, 19 bp, Artificial Sequence
  Target HLA Sequence complement
ggagatcacactgacctgg

SEQ ID NO: 9659 - DNA, 19 bp, Artificial Sequence
  Target HLA Sequence complement
gagatcacactgacctggc

SEQ ID NO: 9660 - DNA, 19 bp, Artificial Sequence
  Target HLA Sequence complement
agatcacactgacctggca

SEQ ID NO: 9661 - DNA, 19 bp, Artificial Sequence
  Target HLA Sequence complement
gatcacactgacctggcag

SEQ ID NO: 9662 - DNA, 19 bp, Artificial Sequence
  Target HLA Sequence complement
atcacactgacctggcagc

SEQ ID NO: 9663 - DNA, 19 bp, Artificial Sequence
  Target HLA Sequence complement
gggatggaaccttccagaa

SEQ ID NO: 9664 - DNA, 19 bp, Artificial Sequence
  Target HLA Sequence complement
ggatggaaccttccagaag

SEQ ID NO: 9665 - DNA, 19 bp, Artificial Sequence
  Target HLA Sequence complement
gatggaaccttccagaagt

SEQ ID NO: 9666 - DNA, 19 bp, Artificial Sequence
  Target HLA Sequence complement
atggaaccttccagaagtg

SEQ ID NO: 9667 - DNA, 19 bp, Artificial Sequence
  Target HLA Sequence complement
tggaaccttccagaagtgg

SEQ ID NO: 9668 - DNA, 19 bp, Artificial Sequence
  Target HLA Sequence complement
ggaaccttccagaagtggg

SEQ ID NO: 9669 - DNA, 19 bp, Artificial Sequence
  Target HLA Sequence complement
gaaccttccagaagtgggc

SEQ ID NO: 9670 - DNA, 19 bp, Artificial Sequence
  Target HLA Sequence complement
aaccttccagaagtgggcg

SEQ ID NO: 9671 - DNA, 19 bp, Artificial Sequence
  Target HLA Sequence complement
tgtggtggtgccttctgga

SEQ ID NO: 9672 - DNA, 19 bp, Artificial Sequence
  Target HLA Sequence complement
tggtggtgccttctggaca

SEQ ID NO: 9673 - DNA, 19 bp, Artificial Sequence
  Target HLA Sequence complement
tggtgccttctggacagga

SEQ ID NO: 9674 - DNA, 19 bp, Artificial Sequence
  Target HLA Sequence complement
tgccttctggacaggagca

SEQ ID NO: 9675 - DNA, 19 bp, Artificial Sequence
  Target HLA Sequence complement
ccttctggacaggagcaga

SEQ ID NO: 9676 - DNA, 19 bp, Artificial Sequence
  Target HLA Sequence complement
cttctggacaggagcagag

SEQ ID NO: 9677 - DNA, 19 bp, Artificial Sequence
  Target HLA Sequence complement
ttctggacaggagcagaga

SEQ ID NO: 9678 - DNA, 19 bp, Artificial Sequence
  Target HLA Sequence complement
tctggacaggagcagagat

SEQ ID NO: 9679 - DNA, 19 bp, Artificial Sequence
  Target HLA Sequence complement
ctggacaggagcagagata

SEQ ID NO: 9680 - DNA, 19 bp, Artificial Sequence
  Target HLA Sequence complement
tggacaggagcagagatac

SEQ ID NO: 9681 - DNA, 19 bp, Artificial Sequence
  Target HLA Sequence complement
ggacaggagcagagataca

SEQ ID NO: 9682 - DNA, 19 bp, Artificial Sequence
  Target HLA Sequence complement
gacaggagcagagatacac

SEQ ID NO: 9683 - DNA, 19 bp, Artificial Sequence
  Target HLA Sequence complement
acaggagcagagatacacc

SEQ ID NO: 9684 - DNA, 19 bp, Artificial Sequence
  Target HLA Sequence complement
caggagcagagatacacct

SEQ ID NO: 9685 - DNA, 19 bp, Artificial Sequence
  Target HLA Sequence complement
aggagcagagatacacctg

SEQ ID NO: 9686 - DNA, 19 bp, Artificial Sequence
  Target HLA Sequence complement
ggagcagagatacacctgc

SEQ ID NO: 9687 - DNA, 19 bp, Artificial Sequence
  Target HLA Sequence complement
gagcagagatacacctgcc

SEQ ID NO: 9688 - DNA, 19 bp, Artificial Sequence
  Target HLA Sequence complement
agcagagatacacctgcca

SEQ ID NO: 9689 - DNA, 19 bp, Artificial Sequence
  Target HLA Sequence complement
gcagagatacacctgccat

SEQ ID NO: 9690 - DNA, 19 bp, Artificial Sequence
  Target HLA Sequence complement
cagagatacacctgccatg

SEQ ID NO: 9691 - DNA, 19 bp, Artificial Sequence
  Target HLA Sequence complement
agagatacacctgccatgt

SEQ ID NO: 9692 - DNA, 19 bp, Artificial Sequence
  Target HLA Sequence complement
gagatacacctgccatgtg

SEQ ID NO: 9693 - DNA, 19 bp, Artificial Sequence
  Target HLA Sequence complement
agatacacctgccatgtgc

SEQ ID NO: 9694 - DNA, 19 bp, Artificial Sequence
  Target HLA Sequence complement
gatacacctgccatgtgca

SEQ ID NO: 9695 - DNA, 19 bp, Artificial Sequence
  Target HLA Sequence complement
atacacctgccatgtgcag

SEQ ID NO: 9696 - DNA, 19 bp, Artificial Sequence
  Target HLA Sequence complement
tacacctgccatgtgcagc

SEQ ID NO: 9697 - DNA, 19 bp, Artificial Sequence
  Target HLA Sequence complement
acacctgccatgtgcagca

SEQ ID NO: 9698 - DNA, 19 bp, Artificial Sequence
  Target HLA Sequence complement
cacctgccatgtgcagcat

SEQ ID NO: 9699 - DNA, 19 bp, Artificial Sequence
  Target HLA Sequence complement
acctgccatgtgcagcatg

SEQ ID NO: 9700 - DNA, 19 bp, Artificial Sequence
  Target HLA Sequence complement
cctgccatgtgcagcatga

SEQ ID NO: 9701 - DNA, 19 bp, Artificial Sequence
  Target HLA Sequence complement
ctgccatgtgcagcatgag

SEQ ID NO: 9702 - DNA, 19 bp, Artificial Sequence
  Target HLA Sequence complement
tgccatgtgcagcatgagg

SEQ ID NO: 9703 - DNA, 19 bp, Artificial Sequence
  Target HLA Sequence complement
ccatgtgcagcatgagggt

SEQ ID NO: 9704 - DNA, 19 bp, Artificial Sequence
  Target HLA Sequence complement
catgtgcagcatgagggtt

SEQ ID NO: 9705 - DNA, 19 bp, Artificial Sequence
  Target HLA Sequence complement
atgtgcagcatgagggttt

SEQ ID NO: 9706 - DNA, 19 bp, Artificial Sequence
  Target HLA Sequence complement
tgtgcagcatgagggtttg

SEQ ID NO: 9707 - DNA, 19 bp, Artificial Sequence
  Target HLA Sequence complement
gtgcagcatgagggtttgc

SEQ ID NO: 9708 - DNA, 19 bp, Artificial Sequence
  Target HLA Sequence complement
tgcagcatgagggtttgcc

SEQ ID NO: 9709 - DNA, 19 bp, Artificial Sequence
  Target HLA Sequence complement
cagcatgagggtttgccca

SEQ ID NO: 9710 - DNA, 19 bp, Artificial Sequence
  Target HLA Sequence complement
agcatgagggtttgcccaa

SEQ ID NO: 9711 - DNA, 19 bp, Artificial Sequence
  Target HLA Sequence complement
gcatgagggtttgcccaag

SEQ ID NO: 9712 - DNA, 19 bp, Artificial Sequence
  Target HLA Sequence complement
catgagggtttgcccaagc

SEQ ID NO: 9713 - DNA, 19 bp, Artificial Sequence
  Target HLA Sequence complement
atgagggtttgcccaagcc

SEQ ID NO: 9714 - DNA, 19 bp, Artificial Sequence
  Target HLA Sequence complement
ctgagatgggagccgtctt

SEQ ID NO: 9715 - DNA, 19 bp, Artificial Sequence
  Target HLA Sequence complement
tgagatgggagccgtcttc

SEQ ID NO: 9716 - DNA, 19 bp, Artificial Sequence
  Target HLA Sequence complement
cccatcgtgggcatcattg

SEQ ID NO: 9717 - DNA, 19 bp, Artificial Sequence
  Target HLA Sequence complement
ccatcgtgggcatcattgc

SEQ ID NO: 9718 - DNA, 19 bp, Artificial Sequence
  Target HLA Sequence complement
catcgtgggcatcattgct

SEQ ID NO: 9719 - DNA, 19 bp, Artificial Sequence
  Target HLA Sequence complement
atcgtgggcatcattgctg

SEQ ID NO: 9720 - DNA, 19 bp, Artificial Sequence
  Target HLA Sequence complement
tcgtgggcatcattgctgg

SEQ ID NO: 9721 - DNA, 19 bp, Artificial Sequence
  Target HLA Sequence complement
tgggcatcattgctggcct

SEQ ID NO: 9722 - DNA, 19 bp, Artificial Sequence
  Target HLA Sequence complement
gcatcattgctggcctggt

SEQ ID NO: 9723 - DNA, 19 bp, Artificial Sequence
  Target HLA Sequence complement
catcattgctggcctggtt

SEQ ID NO: 9724 - DNA, 19 bp, Artificial Sequence
  Target HLA Sequence complement
atcattgctggcctggttc

SEQ ID NO: 9725 - DNA, 19 bp, Artificial Sequence
  Target HLA Sequence complement
tcattgctggcctggttct

SEQ ID NO: 9726 - DNA, 19 bp, Artificial Sequence
  Target HLA Sequence complement
cattgctggcctggttctc

SEQ ID NO: 9727 - DNA, 19 bp, Artificial Sequence
  Target HLA Sequence complement
attgctggcctggttctct

SEQ ID NO: 9728 - DNA, 19 bp, Artificial Sequence
  Target HLA Sequence complement
ttgctggcctggttctctt

SEQ ID NO: 9729 - DNA, 19 bp, Artificial Sequence
  Target HLA Sequence complement
tgctggcctggttctcttt

SEQ ID NO: 9730 - DNA, 19 bp, Artificial Sequence
  Target HLA Sequence complement
gctggcctggttctctttg

SEQ ID NO: 9731 - DNA, 19 bp, Artificial Sequence
  Target HLA Sequence complement
ctggcctggttctctttgg

SEQ ID NO: 9732 - DNA, 19 bp, Artificial Sequence
  Target HLA Sequence complement
tggcctggttctctttgga

SEQ ID NO: 9733 - DNA, 19 bp, Artificial Sequence
  Target HLA Sequence complement
ggcctggttctctttggag

SEQ ID NO: 9734 - DNA, 19 bp, Artificial Sequence
  Target HLA Sequence complement
gcctggttctctttggagc

SEQ ID NO: 9735 - DNA, 19 bp, Artificial Sequence
  Target HLA Sequence complement
cctggttctctttggagct

SEQ ID NO: 9736 - DNA, 19 bp, Artificial Sequence
  Target HLA Sequence complement
ctggttctctttggagctg

SEQ ID NO: 9737 - DNA, 19 bp, Artificial Sequence
  Target HLA Sequence complement
tggttctctttggagctgt

SEQ ID NO: 9738 - DNA, 19 bp, Artificial Sequence
  Target HLA Sequence complement
ggttctctttggagctgtg

SEQ ID NO: 9739 - DNA, 19 bp, Artificial Sequence
  Target HLA Sequence complement
gttctctttggagctgtga

SEQ ID NO: 9740 - DNA, 19 bp, Artificial Sequence
  Target HLA Sequence complement
ttctctttggagctgtgat

SEQ ID NO: 9741 - DNA, 19 bp, Artificial Sequence
  Target HLA Sequence complement
tctctttggagctgtgatc

SEQ ID NO: 9742 - DNA, 19 bp, Artificial Sequence
  Target HLA Sequence complement
ctctttggagctgtgatca

SEQ ID NO: 9743 - DNA, 19 bp, Artificial Sequence
  Target HLA Sequence complement
tctttggagctgtgatcac

SEQ ID NO: 9744 - DNA, 19 bp, Artificial Sequence
  Target HLA Sequence complement
ctttggagctgtgatcact

SEQ ID NO: 9745 - DNA, 19 bp, Artificial Sequence
  Target HLA Sequence complement
tttggagctgtgatcactg

SEQ ID NO: 9746 - DNA, 19 bp, Artificial Sequence
  Target HLA Sequence complement
ttggagctgtgatcactgg

SEQ ID NO: 9747 - DNA, 19 bp, Artificial Sequence
  Target HLA Sequence complement
tggagctgtgatcactgga

SEQ ID NO: 9748 - DNA, 19 bp, Artificial Sequence
  Target HLA Sequence complement
ggagctgtgatcactggag

SEQ ID NO: 9749 - DNA, 19 bp, Artificial Sequence
  Target HLA Sequence complement
gagctgtgatcactggagc

SEQ ID NO: 9750 - DNA, 19 bp, Artificial Sequence
  Target HLA Sequence complement
agctgtgatcactggagct

SEQ ID NO: 9751 - DNA, 19 bp, Artificial Sequence
  Target HLA Sequence complement
gctgtgatcactggagctg

SEQ ID NO: 9752 - DNA, 19 bp, Artificial Sequence
  Target HLA Sequence complement
ctgtgatcactggagctgt

SEQ ID NO: 9753 - DNA, 19 bp, Artificial Sequence
  Target HLA Sequence complement
tgtgatcactggagctgtg

SEQ ID NO: 9754 - DNA, 19 bp, Artificial Sequence
  Target HLA Sequence complement
gtgatcactggagctgtgg

SEQ ID NO: 9755 - DNA, 19 bp, Artificial Sequence
  Target HLA Sequence complement
tgatcactggagctgtggt

SEQ ID NO: 9756 - DNA, 19 bp, Artificial Sequence
  Target HLA Sequence complement
gatcactggagctgtggtc

SEQ ID NO: 9757 - DNA, 19 bp, Artificial Sequence
  Target HLA Sequence complement
atcactggagctgtggtcg

SEQ ID NO: 9758 - DNA, 19 bp, Artificial Sequence
  Target HLA Sequence complement
ctgtggtcgctgctgtgat

SEQ ID NO: 9759 - DNA, 19 bp, Artificial Sequence
  Target HLA Sequence complement
tgtggtcgctgctgtgatg

SEQ ID NO: 9760 - DNA, 19 bp, Artificial Sequence
  Target HLA Sequence complement
gtggtcgctgctgtgatgt

SEQ ID NO: 9761 - DNA, 19 bp, Artificial Sequence
  Target HLA Sequence complement
tggtcgctgctgtgatgtg

SEQ ID NO: 9762 - DNA, 19 bp, Artificial Sequence
  Target HLA Sequence complement
gtcgctgctgtgatgtgga

SEQ ID NO: 9763 - DNA, 19 bp, Artificial Sequence
  Target HLA Sequence complement
tcgctgctgtgatgtggag

SEQ ID NO: 9764 - DNA, 19 bp, Artificial Sequence
  Target HLA Sequence complement
gctgctgtgatgtggagga

SEQ ID NO: 9765 - DNA, 19 bp, Artificial Sequence
  Target HLA Sequence complement
ctgctgtgatgtggaggag

SEQ ID NO: 9766 - DNA, 19 bp, Artificial Sequence
  Target HLA Sequence complement
tgctgtgatgtggaggagg

SEQ ID NO: 9767 - DNA, 19 bp, Artificial Sequence
  Target HLA Sequence complement
gctgtgatgtggaggagga

SEQ ID NO: 9768 - DNA, 19 bp, Artificial Sequence
  Target HLA Sequence complement
ctgtgatgtggaggaggaa

SEQ ID NO: 9769 - DNA, 19 bp, Artificial Sequence
  Target HLA Sequence complement
tgtgatgtggaggaggaag

SEQ ID NO: 9770 - DNA, 19 bp, Artificial Sequence
  Target HLA Sequence complement
gtgatgtggaggaggaaga

SEQ ID NO: 9771 - DNA, 19 bp, Artificial Sequence
  Target HLA Sequence complement
tgatgtggaggaggaagag

SEQ ID NO: 9772 - DNA, 19 bp, Artificial Sequence
  Target HLA Sequence complement
gatgtggaggaggaagagc

SEQ ID NO: 9773 - DNA, 19 bp, Artificial Sequence
  Target HLA Sequence complement
atgtggaggaggaagagct

SEQ ID NO: 9774 - DNA, 19 bp, Artificial Sequence
  Target HLA Sequence complement
tgtggaggaggaagagctc

SEQ ID NO: 9775 - DNA, 19 bp, Artificial Sequence
  Target HLA Sequence complement
gtggaggaggaagagctca

SEQ ID NO: 9776 - DNA, 19 bp, Artificial Sequence
  Target HLA Sequence complement
tggaggaggaagagctcag

SEQ ID NO: 9777 - DNA, 19 bp, Artificial Sequence
  Target HLA Sequence complement
ggaggaggaagagctcaga

SEQ ID NO: 9778 - DNA, 19 bp, Artificial Sequence
  Target HLA Sequence complement
gaggaggaagagctcagat

SEQ ID NO: 9779 - DNA, 19 bp, Artificial Sequence
  Target HLA Sequence complement
aggaggaagagctcagata

SEQ ID NO: 9780 - DNA, 19 bp, Artificial Sequence
  Target HLA Sequence complement
ggaggaagagctcagatag

SEQ ID NO: 9781 - DNA, 19 bp, Artificial Sequence
  Target HLA Sequence complement
gaggaagagctcagataga

SEQ ID NO: 9782 - DNA, 19 bp, Artificial Sequence
  Target HLA Sequence complement
aggaagagctcagatagaa

SEQ ID NO: 9783 - DNA, 19 bp, Artificial Sequence
  Target HLA Sequence complement
aaaggagggagctactctc

SEQ ID NO: 9784 - DNA, 19 bp, Artificial Sequence
  Target HLA Sequence complement
aaggagggagctactctca

SEQ ID NO: 9785 - DNA, 19 bp, Artificial Sequence
  Target HLA Sequence complement
aggagggagctactctcag

SEQ ID NO: 9786 - DNA, 19 bp, Artificial Sequence
  Target HLA Sequence complement
agggagctactctcaggct

SEQ ID NO: 9787 - DNA, 19 bp, Artificial Sequence
  Target HLA Sequence complement
gagctactctcaggctgca

SEQ ID NO: 9788 - DNA, 19 bp, Artificial Sequence
  Target HLA Sequence complement
agctactctcaggctgcaa

SEQ ID NO: 9789 - DNA, 19 bp, Artificial Sequence
  Target HLA Sequence complement
gctactctcaggctgcaag

SEQ ID NO: 9790 - DNA, 19 bp, Artificial Sequence
  Target HLA Sequence complement
ctactctcaggctgcaagc

SEQ ID NO: 9791 - DNA, 19 bp, Artificial Sequence
  Target HLA Sequence complement
tactctcaggctgcaagca

SEQ ID NO: 9792 - DNA, 19 bp, Artificial Sequence
  Target HLA Sequence complement
actctcaggctgcaagcag

SEQ ID NO: 9793 - DNA, 19 bp, Artificial Sequence
  Target HLA Sequence complement
ctctcaggctgcaagcagt

SEQ ID NO: 9794 - DNA, 19 bp, Artificial Sequence
  Target HLA Sequence complement
tctcaggctgcaagcagtg

SEQ ID NO: 9795 - DNA, 19 bp, Artificial Sequence
  Target HLA Sequence complement
ctcaggctgcaagcagtga

SEQ ID NO: 9796 - DNA, 19 bp, Artificial Sequence
  Target HLA Sequence complement
tcaggctgcaagcagtgac

SEQ ID NO: 9797 - DNA, 19 bp, Artificial Sequence
  Target HLA Sequence complement
caggctgcaagcagtgaca

SEQ ID NO: 9798 - DNA, 19 bp, Artificial Sequence
  Target HLA Sequence complement
aggctgcaagcagtgacag

SEQ ID NO: 9799 - DNA, 19 bp, Artificial Sequence
  Target HLA Sequence complement
ggctgcaagcagtgacagt

SEQ ID NO: 9800 - DNA, 19 bp, Artificial Sequence
  Target HLA Sequence complement
gctgcaagcagtgacagtg

SEQ ID NO: 9801 - DNA, 19 bp, Artificial Sequence
  Target HLA Sequence complement
ctgcaagcagtgacagtgc

SEQ ID NO: 9802 - DNA, 19 bp, Artificial Sequence
  Target HLA Sequence complement
tgcaagcagtgacagtgcc

SEQ ID NO: 9803 - DNA, 19 bp, Artificial Sequence
  Target HLA Sequence complement
caagcagtgacagtgccca

SEQ ID NO: 9804 - DNA, 19 bp, Artificial Sequence
  Target HLA Sequence complement
aagcagtgacagtgcccag

SEQ ID NO: 9805 - DNA, 19 bp, Artificial Sequence
  Target HLA Sequence complement
ccagggctctgatgtgtct

SEQ ID NO: 9806 - DNA, 19 bp, Artificial Sequence
  Target HLA Sequence complement
cagggctctgatgtgtctc

SEQ ID NO: 9807 - DNA, 19 bp, Artificial Sequence
  Target HLA Sequence complement
agggctctgatgtgtctct

SEQ ID NO: 9808 - DNA, 19 bp, Artificial Sequence
  Target HLA Sequence complement
gggctctgatgtgtctctc

SEQ ID NO: 9809 - DNA, 19 bp, Artificial Sequence
  Target HLA Sequence complement
ggctctgatgtgtctctca

SEQ ID NO: 9810 - DNA, 19 bp, Artificial Sequence
  Target HLA Sequence complement
gctctgatgtgtctctcac

SEQ ID NO: 9811 - DNA, 19 bp, Artificial Sequence
  Target HLA Sequence complement
ctctgatgtgtctctcaca

SEQ ID NO: 9812 - DNA, 19 bp, Artificial Sequence
  Target HLA Sequence complement
tctgatgtgtctctcacag

SEQ ID NO: 9813 - DNA, 19 bp, Artificial Sequence
  Target HLA Sequence complement
ctgatgtgtctctcacagc

SEQ ID NO: 9814 - DNA, 19 bp, Artificial Sequence
  Target HLA Sequence complement
tgatgtgtctctcacagct

SEQ ID NO: 9815 - DNA, 19 bp, Artificial Sequence
  Target HLA Sequence complement
gatgtgtctctcacagctt

SEQ ID NO: 9816 - DNA, 19 bp, Artificial Sequence
  Target HLA Sequence complement
atgtgtctctcacagcttg

SEQ ID NO: 9817 - DNA, 19 bp, Artificial Sequence
  Target HLA Sequence complement
tgtgtctctcacagcttgt

SEQ ID NO: 9818 - DNA, 19 bp, Artificial Sequence
  Target HLA Sequence complement
gtgtctctcacagcttgta

SEQ ID NO: 9819 - DNA, 19 bp, Artificial Sequence
  Target HLA Sequence complement
tgtctctcacagcttgtaa

SEQ ID NO: 9820 - DNA, 19 bp, Artificial Sequence
  Target HLA Sequence complement
gtctctcacagcttgtaaa

SEQ ID NO: 9821 - DNA, 19 bp, Artificial Sequence
  Target HLA Sequence complement
tctctcacagcttgtaaag

SEQ ID NO: 9822 - DNA, 19 bp, Artificial Sequence
  Target HLA Sequence complement
ctctcacagcttgtaaagt

SEQ ID NO: 9823 - DNA, 19 bp, Artificial Sequence
  Target HLA Sequence complement
tctcacagcttgtaaagtg

SEQ ID NO: 9824 - DNA, 19 bp, Artificial Sequence
  Target HLA Sequence complement
ctcacagcttgtaaagtgt

SEQ ID NO: 9825 - DNA, 19 bp, Artificial Sequence
  Target HLA Sequence complement
tcacagcttgtaaagtgtg

SEQ ID NO: 9826 - DNA, 19 bp, Artificial Sequence
  Target HLA Sequence complement
cacagcttgtaaagtgtga

SEQ ID NO: 9827 - DNA, 19 bp, Artificial Sequence
  Target HLA Sequence complement
acagcttgtaaagtgtgag

SEQ ID NO: 9828 - DNA, 19 bp, Artificial Sequence
  Target HLA Sequence complement
cagcttgtaaagtgtgaga

SEQ ID NO: 9829 - DNA, 19 bp, Artificial Sequence
  Target HLA Sequence complement
agcttgtaaagtgtgagac

SEQ ID NO: 9830 - DNA, 19 bp, Artificial Sequence
  Target HLA Sequence complement
gcttgtaaagtgtgagaca

SEQ ID NO: 9831 - DNA, 19 bp, Artificial Sequence
  Target HLA Sequence complement
cttgtaaagtgtgagacag

SEQ ID NO: 9832 - DNA, 19 bp, Artificial Sequence
  Target HLA Sequence complement
ttgtaaagtgtgagacagc

SEQ ID NO: 9833 - DNA, 19 bp, Artificial Sequence
  Target HLA Sequence complement
tgtaaagtgtgagacagct

SEQ ID NO: 9834 - DNA, 19 bp, Artificial Sequence
  Target HLA Sequence complement
gtaaagtgtgagacagctg

SEQ ID NO: 9835 - DNA, 19 bp, Artificial Sequence
  Target HLA Sequence complement
taaagtgtgagacagctgc

SEQ ID NO: 9836 - DNA, 19 bp, Artificial Sequence
  Target HLA Sequence complement
aaagtgtgagacagctgcc

SEQ ID NO: 9837 - DNA, 19 bp, Artificial Sequence
  Target HLA Sequence complement
aagtgtgagacagctgcct

SEQ ID NO: 9838 - DNA, 19 bp, Artificial Sequence
  Target HLA Sequence complement
agtgtgagacagctgcctt

SEQ ID NO: 9839 - DNA, 19 bp, Artificial Sequence
  Target HLA Sequence complement
tgtgagacagctgccttgt

SEQ ID NO: 9840 - DNA, 19 bp, Artificial Sequence
  Target HLA Sequence complement
gtgagacagctgccttgtg

SEQ ID NO: 9841 - DNA, 19 bp, Artificial Sequence
  Target HLA Sequence complement
tgagacagctgccttgtgt

SEQ ID NO: 9842 - DNA, 19 bp, Artificial Sequence
  Target HLA Sequence complement
gagacagctgccttgtgtg

SEQ ID NO: 9843 - DNA, 19 bp, Artificial Sequence
  Target HLA Sequence complement
agacagctgccttgtgtgg

SEQ ID NO: 9844 - DNA, 19 bp, Artificial Sequence
  Target HLA Sequence complement
acagctgccttgtgtggga

SEQ ID NO: 9845 - DNA, 19 bp, Artificial Sequence
  Target HLA Sequence complement
agctgccttgtgtgggact

SEQ ID NO: 9846 - DNA, 19 bp, Artificial Sequence
  Target HLA Sequence complement
ctgccttgtgtgggactga

SEQ ID NO: 9847 - DNA, 19 bp, Artificial Sequence
  Target HLA Sequence complement
tgccttgtgtgggactgag

SEQ ID NO: 9848 - DNA, 19 bp, Artificial Sequence
  Target HLA Sequence complement
gccttgtgtgggactgaga

SEQ ID NO: 9849 - DNA, 19 bp, Artificial Sequence
  Target HLA Sequence complement
ccttgtgtgggactgagag

SEQ ID NO: 9850 - DNA, 19 bp, Artificial Sequence
  Target HLA Sequence complement
cttgtgtgggactgagagg

SEQ ID NO: 9851 - DNA, 19 bp, Artificial Sequence
  Target HLA Sequence complement
ttgtgtgggactgagaggc

SEQ ID NO: 9852 - DNA, 19 bp, Artificial Sequence
  Target HLA Sequence complement
tgtgtgggactgagaggca

SEQ ID NO: 9853 - DNA, 19 bp, Artificial Sequence
  Target HLA Sequence complement
gtgtgggactgagaggcaa

SEQ ID NO: 9854 - DNA, 19 bp, Artificial Sequence
  Target HLA Sequence complement
tgtgggactgagaggcaag

SEQ ID NO: 9855 - DNA, 19 bp, Artificial Sequence
  Target HLA Sequence complement
gtgggactgagaggcaaga

SEQ ID NO: 9856 - DNA, 19 bp, Artificial Sequence
  Target HLA Sequence complement
tgggactgagaggcaagag

SEQ ID NO: 9857 - DNA, 19 bp, Artificial Sequence
  Target HLA Sequence complement
gggactgagaggcaagagt

SEQ ID NO: 9858 - DNA, 19 bp, Artificial Sequence
  Target HLA Sequence complement
ggactgagaggcaagagtt

SEQ ID NO: 9859 - DNA, 19 bp, Artificial Sequence
  Target HLA Sequence complement
gactgagaggcaagagttg

SEQ ID NO: 9860 - DNA, 19 bp, Artificial Sequence
  Target HLA Sequence complement
actgagaggcaagagttgt

SEQ ID NO: 9861 - DNA, 19 bp, Artificial Sequence
  Target HLA Sequence complement
ctgagaggcaagagttgtt

SEQ ID NO: 9862 - DNA, 19 bp, Artificial Sequence
  Target HLA Sequence complement
tgagaggcaagagttgttc

SEQ ID NO: 9863 - DNA, 19 bp, Artificial Sequence
  Target HLA Sequence complement
gagaggcaagagttgttcc

SEQ ID NO: 9864 - DNA, 19 bp, Artificial Sequence
  Target HLA Sequence complement
agaggcaagagttgttcct

SEQ ID NO: 9865 - DNA, 19 bp, Artificial Sequence
  Target HLA Sequence complement
gaggcaagagttgttcctg

SEQ ID NO: 9866 - DNA, 19 bp, Artificial Sequence
  Target HLA Sequence complement
aggcaagagttgttcctgc

SEQ ID NO: 9867 - DNA, 19 bp, Artificial Sequence
  Target HLA Sequence complement
ggcaagagttgttcctgcc

SEQ ID NO: 9868 - DNA, 19 bp, Artificial Sequence
  Target HLA Sequence complement
gcaagagttgttcctgccc

SEQ ID NO: 9869 - DNA, 19 bp, Artificial Sequence
  Target HLA Sequence complement
caagagttgttcctgccct

SEQ ID NO: 9870 - DNA, 19 bp, Artificial Sequence
  Target HLA Sequence complement
aagagttgttcctgccctt

SEQ ID NO: 9871 - DNA, 19 bp, Artificial Sequence
  Target HLA Sequence complement
agagttgttcctgcccttc

SEQ ID NO: 9872 - DNA, 19 bp, Artificial Sequence
  Target HLA Sequence complement
gagttgttcctgcccttcc

SEQ ID NO: 9873 - DNA, 19 bp, Artificial Sequence
  Target HLA Sequence complement
agttgttcctgcccttccc

SEQ ID NO: 9874 - DNA, 19 bp, Artificial Sequence
  Target HLA Sequence complement
gttgttcctgcccttccct

SEQ ID NO: 9875 - DNA, 19 bp, Artificial Sequence
  Target HLA Sequence complement
ttgttcctgcccttccctt

SEQ ID NO: 9876 - DNA, 19 bp, Artificial Sequence
  Target HLA Sequence complement
tgttcctgcccttcccttt

SEQ ID NO: 9877 - DNA, 19 bp, Artificial Sequence
  Target HLA Sequence complement
gttcctgcccttccctttg

SEQ ID NO: 9878 - DNA, 19 bp, Artificial Sequence
  Target HLA Sequence complement
ttcctgcccttccctttgt

SEQ ID NO: 9879 - DNA, 19 bp, Artificial Sequence
  Target HLA Sequence complement
tcctgcccttccctttgtg

SEQ ID NO: 9880 - DNA, 19 bp, Artificial Sequence
  Target HLA Sequence complement
cctgcccttccctttgtga

SEQ ID NO: 9881 - DNA, 19 bp, Artificial Sequence
  Target HLA Sequence complement
ctgcccttccctttgtgac

SEQ ID NO: 9882 - DNA, 19 bp, Artificial Sequence
  Target HLA Sequence complement
tgcccttccctttgtgact

SEQ ID NO: 9883 - DNA, 19 bp, Artificial Sequence
  Target HLA Sequence complement
gcccttccctttgtgactt

SEQ ID NO: 9884 - DNA, 19 bp, Artificial Sequence
  Target HLA Sequence complement
cccttccctttgtgacttg

SEQ ID NO: 9885 - DNA, 19 bp, Artificial Sequence
  Target HLA Sequence complement
ccttccctttgtgacttga

SEQ ID NO: 9886 - DNA, 19 bp, Artificial Sequence
  Target HLA Sequence complement
cttccctttgtgacttgaa

SEQ ID NO: 9887 - DNA, 19 bp, Artificial Sequence
  Target HLA Sequence complement
ttccctttgtgacttgaag

SEQ ID NO: 9888 - DNA, 19 bp, Artificial Sequence
  Target HLA Sequence complement
tccctttgtgacttgaaga

SEQ ID NO: 9889 - DNA, 19 bp, Artificial Sequence
  Target HLA Sequence complement
ccctttgtgacttgaagaa

SEQ ID NO: 9890 - DNA, 19 bp, Artificial Sequence
  Target HLA Sequence complement
cctttgtgacttgaagaac

SEQ ID NO: 9891 - DNA, 19 bp, Artificial Sequence
  Target HLA Sequence complement
ctttgtgacttgaagaacc

SEQ ID NO: 9892 - DNA, 19 bp, Artificial Sequence
  Target HLA Sequence complement
tttgtgacttgaagaaccc

SEQ ID NO: 9893 - DNA, 19 bp, Artificial Sequence
  Target HLA Sequence complement
ttgtgacttgaagaaccct

SEQ ID NO: 9894 - DNA, 19 bp, Artificial Sequence
  Target HLA Sequence complement
tgtgacttgaagaaccctg

SEQ ID NO: 9895 - DNA, 19 bp, Artificial Sequence
  Target HLA Sequence complement
gtgacttgaagaaccctga

SEQ ID NO: 9896 - DNA, 19 bp, Artificial Sequence
  Target HLA Sequence complement
tgacttgaagaaccctgac

SEQ ID NO: 9897 - DNA, 19 bp, Artificial Sequence
  Target HLA Sequence complement
gacttgaagaaccctgact

SEQ ID NO: 9898 - DNA, 19 bp, Artificial Sequence
  Target HLA Sequence complement
acttgaagaaccctgactt

SEQ ID NO: 9899 - DNA, 19 bp, Artificial Sequence
  Target HLA Sequence complement
cttgaagaaccctgacttt

SEQ ID NO: 9900 - DNA, 19 bp, Artificial Sequence
  Target HLA Sequence complement
ttgaagaaccctgactttg

SEQ ID NO: 9901 - DNA, 19 bp, Artificial Sequence
  Target HLA Sequence complement
tgaagaaccctgactttgt

SEQ ID NO: 9902 - DNA, 19 bp, Artificial Sequence
  Target HLA Sequence complement
gaagaaccctgactttgtt

SEQ ID NO: 9903 - DNA, 19 bp, Artificial Sequence
  Target HLA Sequence complement
aagaaccctgactttgttt

SEQ ID NO: 9904 - DNA, 19 bp, Artificial Sequence
  Target HLA Sequence complement
agaaccctgactttgtttc

SEQ ID NO: 9905 - DNA, 19 bp, Artificial Sequence
  Target HLA Sequence complement
gaaccctgactttgtttct

SEQ ID NO: 9906 - DNA, 19 bp, Artificial Sequence
  Target HLA Sequence complement
aaccctgactttgtttctg

SEQ ID NO: 9907 - DNA, 19 bp, Artificial Sequence
  Target HLA Sequence complement
accctgactttgtttctgc

SEQ ID NO: 9908 - DNA, 19 bp, Artificial Sequence
  Target HLA Sequence complement
ccctgactttgtttctgca

SEQ ID NO: 9909 - DNA, 19 bp, Artificial Sequence
  Target HLA Sequence complement
cctgactttgtttctgcaa

SEQ ID NO: 9910 - DNA, 19 bp, Artificial Sequence
  Target HLA Sequence complement
ctgactttgtttctgcaaa

SEQ ID NO: 9911 - DNA, 19 bp, Artificial Sequence
  Target HLA Sequence complement
tgactttgtttctgcaaag

SEQ ID NO: 9912 - DNA, 19 bp, Artificial Sequence
  Target HLA Sequence complement
gactttgtttctgcaaagg

SEQ ID NO: 9913 - DNA, 19 bp, Artificial Sequence
  Target HLA Sequence complement
actttgtttctgcaaaggc

SEQ ID NO: 9914 - DNA, 19 bp, Artificial Sequence
  Target HLA Sequence complement
ctttgtttctgcaaaggca

SEQ ID NO: 9915 - DNA, 19 bp, Artificial Sequence
  Target HLA Sequence complement
tttgtttctgcaaaggcac

SEQ ID NO: 9916 - DNA, 19 bp, Artificial Sequence
  Target HLA Sequence complement
ttgtttctgcaaaggcacc

SEQ ID NO: 9917 - DNA, 19 bp, Artificial Sequence
  Target HLA Sequence complement
tgtttctgcaaaggcacct

SEQ ID NO: 9918 - DNA, 19 bp, Artificial Sequence
  Target HLA Sequence complement
gtttctgcaaaggcacctg

SEQ ID NO: 9919 - DNA, 19 bp, Artificial Sequence
  Target HLA Sequence complement
tttctgcaaaggcacctgc

SEQ ID NO: 9920 - DNA, 19 bp, Artificial Sequence
  Target HLA Sequence complement
ttctgcaaaggcacctgca

SEQ ID NO: 9921 - DNA, 19 bp, Artificial Sequence
  Target HLA Sequence complement
tctgcaaaggcacctgcat

SEQ ID NO: 9922 - DNA, 19 bp, Artificial Sequence
  Target HLA Sequence complement
ctgcaaaggcacctgcatg

SEQ ID NO: 9923 - DNA, 19 bp, Artificial Sequence
  Target HLA Sequence complement
tgcaaaggcacctgcatgt

SEQ ID NO: 9924 - DNA, 19 bp, Artificial Sequence
  Target HLA Sequence complement
gcaaaggcacctgcatgtg

SEQ ID NO: 9925 - DNA, 19 bp, Artificial Sequence
  Target HLA Sequence complement
caaaggcacctgcatgtgt

SEQ ID NO: 9926 - DNA, 19 bp, Artificial Sequence
  Target HLA Sequence complement
aaaggcacctgcatgtgtc

SEQ ID NO: 9927 - DNA, 19 bp, Artificial Sequence
  Target HLA Sequence complement
aaggcacctgcatgtgtct

SEQ ID NO: 9928 - DNA, 19 bp, Artificial Sequence
  Target HLA Sequence complement
gcacctgcatgtgtctgtg

SEQ ID NO: 9929 - DNA, 19 bp, Artificial Sequence
  Target HLA Sequence complement
cacctgcatgtgtctgtgt

SEQ ID NO: 9930 - DNA, 19 bp, Artificial Sequence
  Target HLA Sequence complement
acctgcatgtgtctgtgtt

SEQ ID NO: 9931 - DNA, 19 bp, Artificial Sequence
  Target HLA Sequence complement
cctgcatgtgtctgtgttc

SEQ ID NO: 9932 - DNA, 19 bp, Artificial Sequence
  Target HLA Sequence complement
ctgcatgtgtctgtgttcg

SEQ ID NO: 9933 - DNA, 19 bp, Artificial Sequence
  Target HLA Sequence complement
tgcatgtgtctgtgttcgt

SEQ ID NO: 9934 - DNA, 19 bp, Artificial Sequence
  Target HLA Sequence complement
gcatgtgtctgtgttcgtg

SEQ ID NO: 9935 - DNA, 19 bp, Artificial Sequence
  Target HLA Sequence complement
catgtgtctgtgttcgtgt

SEQ ID NO: 9936 - DNA, 19 bp, Artificial Sequence
  Target HLA Sequence complement
atgtgtctgtgttcgtgta

SEQ ID NO: 9937 - DNA, 19 bp, Artificial Sequence
  Target HLA Sequence complement
tgtgtctgtgttcgtgtag

SEQ ID NO: 9938 - DNA, 19 bp, Artificial Sequence
  Target HLA Sequence complement
gtgtctgtgttcgtgtagg

SEQ ID NO: 9939 - DNA, 19 bp, Artificial Sequence
  Target HLA Sequence complement
tgtctgtgttcgtgtaggc

SEQ ID NO: 9940 - DNA, 19 bp, Artificial Sequence
  Target HLA Sequence complement
gtctgtgttcgtgtaggca

SEQ ID NO: 9941 - DNA, 19 bp, Artificial Sequence
  Target HLA Sequence complement
tctgtgttcgtgtaggcat

SEQ ID NO: 9942 - DNA, 19 bp, Artificial Sequence
  Target HLA Sequence complement
ctgtgttcgtgtaggcata

SEQ ID NO: 9943 - DNA, 19 bp, Artificial Sequence
  Target HLA Sequence complement
tgtgttcgtgtaggcataa

SEQ ID NO: 9944 - DNA, 19 bp, Artificial Sequence
  Target HLA Sequence complement
gtgttcgtgtaggcataat

SEQ ID NO: 9945 - DNA, 19 bp, Artificial Sequence
  Target HLA Sequence complement
tgttcgtgtaggcataatg

SEQ ID NO: 9946 - DNA, 19 bp, Artificial Sequence
  Target HLA Sequence complement
gttcgtgtaggcataatgt

SEQ ID NO: 9947 - DNA, 19 bp, Artificial Sequence
  Target HLA Sequence complement
ttcgtgtaggcataatgtg

SEQ ID NO: 9948 - DNA, 19 bp, Artificial Sequence
  Target HLA Sequence complement
tcgtgtaggcataatgtga

SEQ ID NO: 9949 - DNA, 19 bp, Artificial Sequence
  Target HLA Sequence complement
cgtgtaggcataatgtgag

SEQ ID NO: 9950 - DNA, 19 bp, Artificial Sequence
  Target HLA Sequence complement
gtgtaggcataatgtgagg

SEQ ID NO: 9951 - DNA, 19 bp, Artificial Sequence
  Target HLA Sequence complement
tgtaggcataatgtgagga

SEQ ID NO: 9952 - DNA, 19 bp, Artificial Sequence
  Target HLA Sequence complement
gtaggcataatgtgaggag

SEQ ID NO: 9953 - DNA, 19 bp, Artificial Sequence
  Target HLA Sequence complement
taggcataatgtgaggagg

SEQ ID NO: 9954 - DNA, 19 bp, Artificial Sequence
  Target HLA Sequence complement
aggcataatgtgaggaggt

SEQ ID NO: 9955 - DNA, 19 bp, Artificial Sequence
  Target HLA Sequence complement
ggcataatgtgaggaggtg

SEQ ID NO: 9956 - DNA, 19 bp, Artificial Sequence
  Target HLA Sequence complement
gcataatgtgaggaggtgg

SEQ ID NO: 9957 - DNA, 19 bp, Artificial Sequence
  Target HLA Sequence complement
cataatgtgaggaggtggg

SEQ ID NO: 9958 - DNA, 19 bp, Artificial Sequence
  Target HLA Sequence complement
ccatgtccaccatgaccct

SEQ ID NO: 9959 - DNA, 19 bp, Artificial Sequence
  Target HLA Sequence complement
catgtccaccatgaccctc

SEQ ID NO: 9960 - DNA, 19 bp, Artificial Sequence
  Target HLA Sequence complement
atgtccaccatgaccctct

SEQ ID NO: 9961 - DNA, 19 bp, Artificial Sequence
  Target HLA Sequence complement
tgtccaccatgaccctctt

SEQ ID NO: 9962 - DNA, 19 bp, Artificial Sequence
  Target HLA Sequence complement
gtccaccatgaccctcttc

SEQ ID NO: 9963 - DNA, 19 bp, Artificial Sequence
  Target HLA Sequence complement
tccaccatgaccctcttcc

SEQ ID NO: 9964 - DNA, 19 bp, Artificial Sequence
  Target HLA Sequence complement
caccatgaccctcttccca

SEQ ID NO: 9965 - DNA, 19 bp, Artificial Sequence
  Target HLA Sequence complement
accatgaccctcttcccac

SEQ ID NO: 9966 - DNA, 19 bp, Artificial Sequence
  Target HLA Sequence complement
atgaccctcttcccacgct

SEQ ID NO: 9967 - DNA, 19 bp, Artificial Sequence
  Target HLA Sequence complement
tcttcccacgctgacctgt

SEQ ID NO: 9968 - DNA, 19 bp, Artificial Sequence
  Target HLA Sequence complement
cccaatcatctttcctgtt

SEQ ID NO: 9969 - DNA, 19 bp, Artificial Sequence
  Target HLA Sequence complement
ccaatcatctttcctgttc

SEQ ID NO: 9970 - DNA, 19 bp, Artificial Sequence
  Target HLA Sequence complement
caatcatctttcctgttcc

SEQ ID NO: 9971 - DNA, 19 bp, Artificial Sequence
  Target HLA Sequence complement
aatcatctttcctgttcca

SEQ ID NO: 9972 - DNA, 19 bp, Artificial Sequence
  Target HLA Sequence complement
atcatctttcctgttccag

SEQ ID NO: 9973 - DNA, 19 bp, Artificial Sequence
  Target HLA Sequence complement
catctttcctgttccagag

SEQ ID NO: 9974 - DNA, 19 bp, Artificial Sequence
  Target HLA Sequence complement
atctttcctgttccagaga

SEQ ID NO: 9975 - DNA, 19 bp, Artificial Sequence
  Target HLA Sequence complement
tctttcctgttccagagag

SEQ ID NO: 9976 - DNA, 19 bp, Artificial Sequence
  Target HLA Sequence complement
ctttcctgttccagagagg

SEQ ID NO: 9977 - DNA, 19 bp, Artificial Sequence
  Target HLA Sequence complement
tttcctgttccagagaggt

SEQ ID NO: 9978 - DNA, 19 bp, Artificial Sequence
  Target HLA Sequence complement
ttcctgttccagagaggtg

SEQ ID NO: 9979 - DNA, 19 bp, Artificial Sequence
  Target HLA Sequence complement
tcctgttccagagaggtgg

SEQ ID NO: 9980 - DNA, 19 bp, Artificial Sequence
  Target HLA Sequence complement
ggctgaggtgtctccatct

SEQ ID NO: 9981 - DNA, 19 bp, Artificial Sequence
  Target HLA Sequence complement
gctgaggtgtctccatctc

SEQ ID NO: 9982 - DNA, 19 bp, Artificial Sequence
  Target HLA Sequence complement
ctgaggtgtctccatctct

SEQ ID NO: 9983 - DNA, 19 bp, Artificial Sequence
  Target HLA Sequence complement
tgaggtgtctccatctctg

SEQ ID NO: 9984 - DNA, 19 bp, Artificial Sequence
  Target HLA Sequence complement
gaggtgtctccatctctgt

SEQ ID NO: 9985 - DNA, 19 bp, Artificial Sequence
  Target HLA Sequence complement
aggtgtctccatctctgtc

SEQ ID NO: 9986 - DNA, 19 bp, Artificial Sequence
  Target HLA Sequence complement
ggtgtctccatctctgtct

SEQ ID NO: 9987 - DNA, 19 bp, Artificial Sequence
  Target HLA Sequence complement
gtgtctccatctctgtctc

SEQ ID NO: 9988 - DNA, 19 bp, Artificial Sequence
  Target HLA Sequence complement
tgtctccatctctgtctca

SEQ ID NO: 9989 - DNA, 19 bp, Artificial Sequence
  Target HLA Sequence complement
gtctccatctctgtctcaa

SEQ ID NO: 9990 - DNA, 19 bp, Artificial Sequence
  Target HLA Sequence complement
tctccatctctgtctcaac

SEQ ID NO: 9991 - DNA, 19 bp, Artificial Sequence
  Target HLA Sequence complement
ctccatctctgtctcaact

SEQ ID NO: 9992 - DNA, 19 bp, Artificial Sequence
  Target HLA Sequence complement
tccatctctgtctcaactt

SEQ ID NO: 9993 - DNA, 19 bp, Artificial Sequence
  Target HLA Sequence complement
ccatctctgtctcaacttc

SEQ ID NO: 9994 - DNA, 19 bp, Artificial Sequence
  Target HLA Sequence complement
catctctgtctcaacttca

SEQ ID NO: 9995 - DNA, 19 bp, Artificial Sequence
  Target HLA Sequence complement
atctctgtctcaacttcat

SEQ ID NO: 9996 - DNA, 19 bp, Artificial Sequence
  Target HLA Sequence complement
tctctgtctcaacttcatg

SEQ ID NO: 9997 - DNA, 19 bp, Artificial Sequence
  Target HLA Sequence complement
ctctgtctcaacttcatgg

SEQ ID NO: 9998 - DNA, 19 bp, Artificial Sequence
  Target HLA Sequence complement
tctgtctcaacttcatggt

SEQ ID NO: 9999 - DNA, 19 bp, Artificial Sequence
  Target HLA Sequence complement
ctgtctcaacttcatggtg

SEQ ID NO: 10000 - DNA, 19 bp, Artificial Sequence
  Target HLA Sequence complement
tgtctcaacttcatggtgc

SEQ ID NO: 10001 - DNA, 19 bp, Artificial Sequence
  Target HLA Sequence complement
gtctcaacttcatggtgca

SEQ ID NO: 10002 - DNA, 19 bp, Artificial Sequence
  Target HLA Sequence complement
tctcaacttcatggtgcac

SEQ ID NO: 10003 - DNA, 19 bp, Artificial Sequence
  Target HLA Sequence complement
ctcaacttcatggtgcact

SEQ ID NO: 10004 - DNA, 19 bp, Artificial Sequence
  Target HLA Sequence complement
tcaacttcatggtgcactg

SEQ ID NO: 10005 - DNA, 19 bp, Artificial Sequence
  Target HLA Sequence complement
caacttcatggtgcactga

SEQ ID NO: 10006 - DNA, 19 bp, Artificial Sequence
  Target HLA Sequence complement
aacttcatggtgcactgag

SEQ ID NO: 10007 - DNA, 19 bp, Artificial Sequence
  Target HLA Sequence complement
acttcatggtgcactgagc

SEQ ID NO: 10008 - DNA, 19 bp, Artificial Sequence
  Target HLA Sequence complement
cttcatggtgcactgagct

SEQ ID NO: 10009 - DNA, 19 bp, Artificial Sequence
  Target HLA Sequence complement
ttcatggtgcactgagctg

SEQ ID NO: 10010 - DNA, 19 bp, Artificial Sequence
  Target HLA Sequence complement
tcatggtgcactgagctgt

SEQ ID NO: 10011 - DNA, 19 bp, Artificial Sequence
  Target HLA Sequence complement
catggtgcactgagctgta

SEQ ID NO: 10012 - DNA, 19 bp, Artificial Sequence
  Target HLA Sequence complement
atggtgcactgagctgtaa

SEQ ID NO: 10013 - DNA, 19 bp, Artificial Sequence
  Target HLA Sequence complement
tggtgcactgagctgtaac

SEQ ID NO: 10014 - DNA, 19 bp, Artificial Sequence
  Target HLA Sequence complement
ggtgcactgagctgtaact

SEQ ID NO: 10015 - DNA, 19 bp, Artificial Sequence
  Target HLA Sequence complement
gtgcactgagctgtaactt

SEQ ID NO: 10016 - DNA, 19 bp, Artificial Sequence
  Target HLA Sequence complement
tgcactgagctgtaacttc

SEQ ID NO: 10017 - DNA, 19 bp, Artificial Sequence
  Target HLA Sequence complement
gcactgagctgtaacttct

SEQ ID NO: 10018 - DNA, 19 bp, Artificial Sequence
  Target HLA Sequence complement
cactgagctgtaacttctt

SEQ ID NO: 10019 - DNA, 19 bp, Artificial Sequence
  Target HLA Sequence complement
actgagctgtaacttcttc

SEQ ID NO: 10020 - DNA, 19 bp, Artificial Sequence
  Target HLA Sequence complement
ctgagctgtaacttcttcc

SEQ ID NO: 10021 - DNA, 19 bp, Artificial Sequence
  Target HLA Sequence complement
tgagctgtaacttcttcct

SEQ ID NO: 10022 - DNA, 19 bp, Artificial Sequence
  Target HLA Sequence complement
gagctgtaacttcttcctt

SEQ ID NO: 10023 - DNA, 19 bp, Artificial Sequence
  Target HLA Sequence complement
agctgtaacttcttccttc

SEQ ID NO: 10024 - DNA, 19 bp, Artificial Sequence
  Target HLA Sequence complement
gctgtaacttcttccttcc

SEQ ID NO: 10025 - DNA, 19 bp, Artificial Sequence
  Target HLA Sequence complement
ctgtaacttcttccttccc

SEQ ID NO: 10026 - DNA, 19 bp, Artificial Sequence
  Target HLA Sequence complement
tgtaacttcttccttccct

SEQ ID NO: 10027 - DNA, 19 bp, Artificial Sequence
  Target HLA Sequence complement
gtaacttcttccttcccta

SEQ ID NO: 10028 - DNA, 19 bp, Artificial Sequence
  Target HLA Sequence complement
taacttcttccttccctat

SEQ ID NO: 10029 - DNA, 19 bp, Artificial Sequence
  Target HLA Sequence complement
aacttcttccttccctatt

SEQ ID NO: 10030 - DNA, 19 bp, Artificial Sequence
  Target HLA Sequence complement
acttcttccttccctatta

SEQ ID NO: 10031 - DNA, 19 bp, Artificial Sequence
  Target HLA Sequence complement
cttcttccttccctattaa

SEQ ID NO: 10032 - DNA, 19 bp, Artificial Sequence
  Target HLA Sequence complement
ttcttccttccctattaaa

SEQ ID NO: 10033 - DNA, 20 bp, Artificial Sequence
  Target HLA Sequence complement
ccgaaggcggtgtatggatt

SEQ ID NO: 10034 - DNA, 20 bp, Artificial Sequence
  Target HLA Sequence complement
cgaaggcggtgtatggattg

SEQ ID NO: 10035 - DNA, 20 bp, Artificial Sequence
  Target HLA Sequence complement
gaaggcggtgtatggattgg

SEQ ID NO: 10036 - DNA, 20 bp, Artificial Sequence
  Target HLA Sequence complement
aaggcggtgtatggattggg

SEQ ID NO: 10037 - DNA, 20 bp, Artificial Sequence
  Target HLA Sequence complement
cccaactccgcagtttcttt

SEQ ID NO: 10038 - DNA, 20 bp, Artificial Sequence
  Target HLA Sequence complement
tttctccctctcccaaccta

SEQ ID NO: 10039 - DNA, 20 bp, Artificial Sequence
  Target HLA Sequence complement
ttctccctctcccaacctat

SEQ ID NO: 10040 - DNA, 20 bp, Artificial Sequence
  Target HLA Sequence complement
tctccctctcccaacctatg

SEQ ID NO: 10041 - DNA, 20 bp, Artificial Sequence
  Target HLA Sequence complement
ctccctctcccaacctatgt

SEQ ID NO: 10042 - DNA, 20 bp, Artificial Sequence
  Target HLA Sequence complement
tccctctcccaacctatgta

SEQ ID NO: 10043 - DNA, 20 bp, Artificial Sequence
  Target HLA Sequence complement
ccctctcccaacctatgtag

SEQ ID NO: 10044 - DNA, 20 bp, Artificial Sequence
  Target HLA Sequence complement
cctctcccaacctatgtagg

SEQ ID NO: 10045 - DNA, 20 bp, Artificial Sequence
  Target HLA Sequence complement
ctctcccaacctatgtaggg

SEQ ID NO: 10046 - DNA, 20 bp, Artificial Sequence
  Target HLA Sequence complement
tctcccaacctatgtagggt

SEQ ID NO: 10047 - DNA, 20 bp, Artificial Sequence
  Target HLA Sequence complement
ctcccaacctatgtagggtc

SEQ ID NO: 10048 - DNA, 20 bp, Artificial Sequence
  Target HLA Sequence complement
tcccaacctatgtagggtcc

SEQ ID NO: 10049 - DNA, 20 bp, Artificial Sequence
  Target HLA Sequence complement
cccaacctatgtagggtcct

SEQ ID NO: 10050 - DNA, 20 bp, Artificial Sequence
  Target HLA Sequence complement
ccaacctatgtagggtcctt

SEQ ID NO: 10051 - DNA, 20 bp, Artificial Sequence
  Target HLA Sequence complement
caacctatgtagggtccttc

SEQ ID NO: 10052 - DNA, 20 bp, Artificial Sequence
  Target HLA Sequence complement
aacctatgtagggtccttct

SEQ ID NO: 10053 - DNA, 20 bp, Artificial Sequence
  Target HLA Sequence complement
acctatgtagggtccttctt

SEQ ID NO: 10054 - DNA, 20 bp, Artificial Sequence
  Target HLA Sequence complement
cctatgtagggtccttcttc

SEQ ID NO: 10055 - DNA, 20 bp, Artificial Sequence
  Target HLA Sequence complement
ctatgtagggtccttcttcc

SEQ ID NO: 10056 - DNA, 20 bp, Artificial Sequence
  Target HLA Sequence complement
tatgtagggtccttcttcct

SEQ ID NO: 10057 - DNA, 20 bp, Artificial Sequence
  Target HLA Sequence complement
atgtagggtccttcttcctg

SEQ ID NO: 10058 - DNA, 20 bp, Artificial Sequence
  Target HLA Sequence complement
tgtagggtccttcttcctgg

SEQ ID NO: 10059 - DNA, 20 bp, Artificial Sequence
  Target HLA Sequence complement
gtagggtccttcttcctgga

SEQ ID NO: 10060 - DNA, 20 bp, Artificial Sequence
  Target HLA Sequence complement
tagggtccttcttcctggat

SEQ ID NO: 10061 - DNA, 20 bp, Artificial Sequence
  Target HLA Sequence complement
agggtccttcttcctggata

SEQ ID NO: 10062 - DNA, 20 bp, Artificial Sequence
  Target HLA Sequence complement
gggtccttcttcctggatac

SEQ ID NO: 10063 - DNA, 20 bp, Artificial Sequence
  Target HLA Sequence complement
ggtccttcttcctggatact

SEQ ID NO: 10064 - DNA, 20 bp, Artificial Sequence
  Target HLA Sequence complement
gtccttcttcctggatactc

SEQ ID NO: 10065 - DNA, 20 bp, Artificial Sequence
  Target HLA Sequence complement
tccttcttcctggatactca

SEQ ID NO: 10066 - DNA, 20 bp, Artificial Sequence
  Target HLA Sequence complement
ccttcttcctggatactcac

SEQ ID NO: 10067 - DNA, 20 bp, Artificial Sequence
  Target HLA Sequence complement
cttcttcctggatactcacg

SEQ ID NO: 10068 - DNA, 20 bp, Artificial Sequence
  Target HLA Sequence complement
ttcttcctggatactcacga

SEQ ID NO: 10069 - DNA, 20 bp, Artificial Sequence
  Target HLA Sequence complement
tcttcctggatactcacgac

SEQ ID NO: 10070 - DNA, 20 bp, Artificial Sequence
  Target HLA Sequence complement
cttcctggatactcacgacg

SEQ ID NO: 10071 - DNA, 20 bp, Artificial Sequence
  Target HLA Sequence complement
ttcctggatactcacgacgc

SEQ ID NO: 10072 - DNA, 20 bp, Artificial Sequence
  Target HLA Sequence complement
gacccagttctcactcccat

SEQ ID NO: 10073 - DNA, 20 bp, Artificial Sequence
  Target HLA Sequence complement
acccagttctcactcccatt

SEQ ID NO: 10074 - DNA, 20 bp, Artificial Sequence
  Target HLA Sequence complement
cccagttctcactcccattg

SEQ ID NO: 10075 - DNA, 20 bp, Artificial Sequence
  Target HLA Sequence complement
ccagttctcactcccattgg

SEQ ID NO: 10076 - DNA, 20 bp, Artificial Sequence
  Target HLA Sequence complement
cagttctcactcccattggg

SEQ ID NO: 10077 - DNA, 20 bp, Artificial Sequence
  Target HLA Sequence complement
agttctcactcccattgggt

SEQ ID NO: 10078 - DNA, 20 bp, Artificial Sequence
  Target HLA Sequence complement
gttctcactcccattgggtg

SEQ ID NO: 10079 - DNA, 20 bp, Artificial Sequence
  Target HLA Sequence complement
ttctcactcccattgggtgt

SEQ ID NO: 10080 - DNA, 20 bp, Artificial Sequence
  Target HLA Sequence complement
tctcactcccattgggtgtc

SEQ ID NO: 10081 - DNA, 20 bp, Artificial Sequence
  Target HLA Sequence complement
tcccattgggtgtcgggttt

SEQ ID NO: 10082 - DNA, 20 bp, Artificial Sequence
  Target HLA Sequence complement
cattgggtgtcgggtttcca

SEQ ID NO: 10083 - DNA, 20 bp, Artificial Sequence
  Target HLA Sequence complement
attgggtgtcgggtttccag

SEQ ID NO: 10084 - DNA, 20 bp, Artificial Sequence
  Target HLA Sequence complement
ttgggtgtcgggtttccaga

SEQ ID NO: 10085 - DNA, 20 bp, Artificial Sequence
  Target HLA Sequence complement
ggtgtcgggtttccagagaa

SEQ ID NO: 10086 - DNA, 20 bp, Artificial Sequence
  Target HLA Sequence complement
gtgtcgggtttccagagaag

SEQ ID NO: 10087 - DNA, 20 bp, Artificial Sequence
  Target HLA Sequence complement
tgtcgggtttccagagaagc

SEQ ID NO: 10088 - DNA, 20 bp, Artificial Sequence
  Target HLA Sequence complement
tcgggtttccagagaagcca

SEQ ID NO: 10089 - DNA, 20 bp, Artificial Sequence
  Target HLA Sequence complement
cgggtttccagagaagccaa

SEQ ID NO: 10090 - DNA, 20 bp, Artificial Sequence
  Target HLA Sequence complement
gggtttccagagaagccaat

SEQ ID NO: 10091 - DNA, 20 bp, Artificial Sequence
  Target HLA Sequence complement
ggtttccagagaagccaatc

SEQ ID NO: 10092 - DNA, 20 bp, Artificial Sequence
  Target HLA Sequence complement
gtttccagagaagccaatca

SEQ ID NO: 10093 - DNA, 20 bp, Artificial Sequence
  Target HLA Sequence complement
tttccagagaagccaatcag

SEQ ID NO: 10094 - DNA, 20 bp, Artificial Sequence
  Target HLA Sequence complement
ttccagagaagccaatcagt

SEQ ID NO: 10095 - DNA, 20 bp, Artificial Sequence
  Target HLA Sequence complement
tccagagaagccaatcagtg

SEQ ID NO: 10096 - DNA, 20 bp, Artificial Sequence
  Target HLA Sequence complement
ccagagaagccaatcagtgt

SEQ ID NO: 10097 - DNA, 20 bp, Artificial Sequence
  Target HLA Sequence complement
cagagaagccaatcagtgtc

SEQ ID NO: 10098 - DNA, 20 bp, Artificial Sequence
  Target HLA Sequence complement
agagaagccaatcagtgtcg

SEQ ID NO: 10099 - DNA, 20 bp, Artificial Sequence
  Target HLA Sequence complement
gagaagccaatcagtgtcgt

SEQ ID NO: 10100 - DNA, 20 bp, Artificial Sequence
  Target HLA Sequence complement
agaagccaatcagtgtcgtc

SEQ ID NO: 10101 - DNA, 20 bp, Artificial Sequence
  Target HLA Sequence complement
gaagccaatcagtgtcgtcg

SEQ ID NO: 10102 - DNA, 20 bp, Artificial Sequence
  Target HLA Sequence complement
aagccaatcagtgtcgtcgc

SEQ ID NO: 10103 - DNA, 20 bp, Artificial Sequence
  Target HLA Sequence complement
tcgcggttctaaagtccgca

SEQ ID NO: 10104 - DNA, 20 bp, Artificial Sequence
  Target HLA Sequence complement
ggttctaaagtccgcacgca

SEQ ID NO: 10105 - DNA, 20 bp, Artificial Sequence
  Target HLA Sequence complement
gttctaaagtccgcacgcac

SEQ ID NO: 10106 - DNA, 20 bp, Artificial Sequence
  Target HLA Sequence complement
ttctaaagtccgcacgcacc

SEQ ID NO: 10107 - DNA, 20 bp, Artificial Sequence
  Target HLA Sequence complement
aaccctcgtcctgctactct

SEQ ID NO: 10108 - DNA, 20 bp, Artificial Sequence
  Target HLA Sequence complement
ggctctcactccatgaggta

SEQ ID NO: 10109 - DNA, 20 bp, Artificial Sequence
  Target HLA Sequence complement
gctctcactccatgaggtat

SEQ ID NO: 10110 - DNA, 20 bp, Artificial Sequence
  Target HLA Sequence complement
ctctcactccatgaggtatt

SEQ ID NO: 10111 - DNA, 20 bp, Artificial Sequence
  Target HLA Sequence complement
tctcactccatgaggtattt

SEQ ID NO: 10112 - DNA, 20 bp, Artificial Sequence
  Target HLA Sequence complement
ctcactccatgaggtatttc

SEQ ID NO: 10113 - DNA, 20 bp, Artificial Sequence
  Target HLA Sequence complement
tcactccatgaggtatttct

SEQ ID NO: 10114 - DNA, 20 bp, Artificial Sequence
  Target HLA Sequence complement
cactccatgaggtatttctt

SEQ ID NO: 10115 - DNA, 20 bp, Artificial Sequence
  Target HLA Sequence complement
actccatgaggtatttcttc

SEQ ID NO: 10116 - DNA, 20 bp, Artificial Sequence
  Target HLA Sequence complement
ctccatgaggtatttcttca

SEQ ID NO: 10117 - DNA, 20 bp, Artificial Sequence
  Target HLA Sequence complement
tccatgaggtatttcttcac

SEQ ID NO: 10118 - DNA, 20 bp, Artificial Sequence
  Target HLA Sequence complement
ccatgaggtatttcttcaca

SEQ ID NO: 10119 - DNA, 20 bp, Artificial Sequence
  Target HLA Sequence complement
catgaggtatttcttcacat

SEQ ID NO: 10120 - DNA, 20 bp, Artificial Sequence
  Target HLA Sequence complement
atgaggtatttcttcacatc

SEQ ID NO: 10121 - DNA, 20 bp, Artificial Sequence
  Target HLA Sequence complement
tgaggtatttcttcacatcc

SEQ ID NO: 10122 - DNA, 20 bp, Artificial Sequence
  Target HLA Sequence complement
gaggtatttcttcacatccg

SEQ ID NO: 10123 - DNA, 20 bp, Artificial Sequence
  Target HLA Sequence complement
aggtatttcttcacatccgt

SEQ ID NO: 10124 - DNA, 20 bp, Artificial Sequence
  Target HLA Sequence complement
ggtatttcttcacatccgtg

SEQ ID NO: 10125 - DNA, 20 bp, Artificial Sequence
  Target HLA Sequence complement
gtatttcttcacatccgtgt

SEQ ID NO: 10126 - DNA, 20 bp, Artificial Sequence
  Target HLA Sequence complement
tatttcttcacatccgtgtc

SEQ ID NO: 10127 - DNA, 20 bp, Artificial Sequence
  Target HLA Sequence complement
atttcttcacatccgtgtcc

SEQ ID NO: 10128 - DNA, 20 bp, Artificial Sequence
  Target HLA Sequence complement
tttcttcacatccgtgtccc

SEQ ID NO: 10129 - DNA, 20 bp, Artificial Sequence
  Target HLA Sequence complement
ttcttcacatccgtgtcccg

SEQ ID NO: 10130 - DNA, 20 bp, Artificial Sequence
  Target HLA Sequence complement
ttcatcgcagtgggctacgt

SEQ ID NO: 10131 - DNA, 20 bp, Artificial Sequence
  Target HLA Sequence complement
tacgtggacgacacgcagtt

SEQ ID NO: 10132 - DNA, 20 bp, Artificial Sequence
  Target HLA Sequence complement
gggagacacggaaagtgaag

SEQ ID NO: 10133 - DNA, 20 bp, Artificial Sequence
  Target HLA Sequence complement
ggagacacggaaagtgaagg

SEQ ID NO: 10134 - DNA, 20 bp, Artificial Sequence
  Target HLA Sequence complement
gagacacggaaagtgaaggc

SEQ ID NO: 10135 - DNA, 20 bp, Artificial Sequence
  Target HLA Sequence complement
agacacggaaagtgaaggcc

SEQ ID NO: 10136 - DNA, 20 bp, Artificial Sequence
  Target HLA Sequence complement
acacggaaagtgaaggccca

SEQ ID NO: 10137 - DNA, 20 bp, Artificial Sequence
  Target HLA Sequence complement
acggaaagtgaaggcccact

SEQ ID NO: 10138 - DNA, 20 bp, Artificial Sequence
  Target HLA Sequence complement
ggaaagtgaaggcccactca

SEQ ID NO: 10139 - DNA, 20 bp, Artificial Sequence
  Target HLA Sequence complement
gaaagtgaaggcccactcac

SEQ ID NO: 10140 - DNA, 20 bp, Artificial Sequence
  Target HLA Sequence complement
aaagtgaaggcccactcaca

SEQ ID NO: 10141 - DNA, 20 bp, Artificial Sequence
  Target HLA Sequence complement
aagtgaaggcccactcacag

SEQ ID NO: 10142 - DNA, 20 bp, Artificial Sequence
  Target HLA Sequence complement
agtgaaggcccactcacaga

SEQ ID NO: 10143 - DNA, 20 bp, Artificial Sequence
  Target HLA Sequence complement
tgaaggcccactcacagact

SEQ ID NO: 10144 - DNA, 20 bp, Artificial Sequence
  Target HLA Sequence complement
aaggcccactcacagactca

SEQ ID NO: 10145 - DNA, 20 bp, Artificial Sequence
  Target HLA Sequence complement
cactcacagactcaccgagt

SEQ ID NO: 10146 - DNA, 20 bp, Artificial Sequence
  Target HLA Sequence complement
actcacagactcaccgagtg

SEQ ID NO: 10147 - DNA, 20 bp, Artificial Sequence
  Target HLA Sequence complement
tcacagactcaccgagtgga

SEQ ID NO: 10148 - DNA, 20 bp, Artificial Sequence
  Target HLA Sequence complement
ggctactacaaccagagcga

SEQ ID NO: 10149 - DNA, 20 bp, Artificial Sequence
  Target HLA Sequence complement
ctactacaaccagagcgagg

SEQ ID NO: 10150 - DNA, 20 bp, Artificial Sequence
  Target HLA Sequence complement
tactacaaccagagcgaggc

SEQ ID NO: 10151 - DNA, 20 bp, Artificial Sequence
  Target HLA Sequence complement
ttctcacaccgtccagagga

SEQ ID NO: 10152 - DNA, 20 bp, Artificial Sequence
  Target HLA Sequence complement
tctcacaccgtccagaggat

SEQ ID NO: 10153 - DNA, 20 bp, Artificial Sequence
  Target HLA Sequence complement
tcacaccgtccagaggatgt

SEQ ID NO: 10154 - DNA, 20 bp, Artificial Sequence
  Target HLA Sequence complement
cacaccgtccagaggatgta

SEQ ID NO: 10155 - DNA, 20 bp, Artificial Sequence
  Target HLA Sequence complement
acaccgtccagaggatgtat

SEQ ID NO: 10156 - DNA, 20 bp, Artificial Sequence
  Target HLA Sequence complement
caccgtccagaggatgtatg

SEQ ID NO: 10157 - DNA, 20 bp, Artificial Sequence
  Target HLA Sequence complement
accgtccagaggatgtatgg

SEQ ID NO: 10158 - DNA, 20 bp, Artificial Sequence
  Target HLA Sequence complement
cgtccagaggatgtatggct

SEQ ID NO: 10159 - DNA, 20 bp, Artificial Sequence
  Target HLA Sequence complement
gtccagaggatgtatggctg

SEQ ID NO: 10160 - DNA, 20 bp, Artificial Sequence
  Target HLA Sequence complement
tccagaggatgtatggctgc

SEQ ID NO: 10161 - DNA, 20 bp, Artificial Sequence
  Target HLA Sequence complement
cagaggatgtatggctgcga

SEQ ID NO: 10162 - DNA, 20 bp, Artificial Sequence
  Target HLA Sequence complement
agaggatgtatggctgcgac

SEQ ID NO: 10163 - DNA, 20 bp, Artificial Sequence
  Target HLA Sequence complement
aggatgtatggctgcgacgt

SEQ ID NO: 10164 - DNA, 20 bp, Artificial Sequence
  Target HLA Sequence complement
taccaccagtacgcctacga

SEQ ID NO: 10165 - DNA, 20 bp, Artificial Sequence
  Target HLA Sequence complement
gcctacgacggcaaggatta

SEQ ID NO: 10166 - DNA, 20 bp, Artificial Sequence
  Target HLA Sequence complement
cctacgacggcaaggattac

SEQ ID NO: 10167 - DNA, 20 bp, Artificial Sequence
  Target HLA Sequence complement
ctacgacggcaaggattaca

SEQ ID NO: 10168 - DNA, 20 bp, Artificial Sequence
  Target HLA Sequence complement
tacgacggcaaggattacat

SEQ ID NO: 10169 - DNA, 20 bp, Artificial Sequence
  Target HLA Sequence complement
acgacggcaaggattacatc

SEQ ID NO: 10170 - DNA, 20 bp, Artificial Sequence
  Target HLA Sequence complement
cgacggcaaggattacatcg

SEQ ID NO: 10171 - DNA, 20 bp, Artificial Sequence
  Target HLA Sequence complement
gacggcaaggattacatcgc

SEQ ID NO: 10172 - DNA, 20 bp, Artificial Sequence
  Target HLA Sequence complement
acggcaaggattacatcgcc

SEQ ID NO: 10173 - DNA, 20 bp, Artificial Sequence
  Target HLA Sequence complement
ggcaaggattacatcgccct

SEQ ID NO: 10174 - DNA, 20 bp, Artificial Sequence
  Target HLA Sequence complement
gcaaggattacatcgccctg

SEQ ID NO: 10175 - DNA, 20 bp, Artificial Sequence
  Target HLA Sequence complement
caaggattacatcgccctga

SEQ ID NO: 10176 - DNA, 20 bp, Artificial Sequence
  Target HLA Sequence complement
aaggattacatcgccctgaa

SEQ ID NO: 10177 - DNA, 20 bp, Artificial Sequence
  Target HLA Sequence complement
aggattacatcgccctgaaa

SEQ ID NO: 10178 - DNA, 20 bp, Artificial Sequence
  Target HLA Sequence complement
gattacatcgccctgaaaga

SEQ ID NO: 10179 - DNA, 20 bp, Artificial Sequence
  Target HLA Sequence complement
attacatcgccctgaaagag

SEQ ID NO: 10180 - DNA, 20 bp, Artificial Sequence
  Target HLA Sequence complement
ttacatcgccctgaaagagg

SEQ ID NO: 10181 - DNA, 20 bp, Artificial Sequence
  Target HLA Sequence complement
tacatcgccctgaaagagga

SEQ ID NO: 10182 - DNA, 20 bp, Artificial Sequence
  Target HLA Sequence complement
acatcgccctgaaagaggac

SEQ ID NO: 10183 - DNA, 20 bp, Artificial Sequence
  Target HLA Sequence complement
atcgccctgaaagaggacct

SEQ ID NO: 10184 - DNA, 20 bp, Artificial Sequence
  Target HLA Sequence complement
tgaaagaggacctgcgctct

SEQ ID NO: 10185 - DNA, 20 bp, Artificial Sequence
  Target HLA Sequence complement
gaaagaggacctgcgctctt

SEQ ID NO: 10186 - DNA, 20 bp, Artificial Sequence
  Target HLA Sequence complement
aaagaggacctgcgctcttg

SEQ ID NO: 10187 - DNA, 20 bp, Artificial Sequence
  Target HLA Sequence complement
atggcagctcagaccaccaa

SEQ ID NO: 10188 - DNA, 20 bp, Artificial Sequence
  Target HLA Sequence complement
agctcagaccaccaagcaca

SEQ ID NO: 10189 - DNA, 20 bp, Artificial Sequence
  Target HLA Sequence complement
gctcagaccaccaagcacaa

SEQ ID NO: 10190 - DNA, 20 bp, Artificial Sequence
  Target HLA Sequence complement
ctcagaccaccaagcacaag

SEQ ID NO: 10191 - DNA, 20 bp, Artificial Sequence
  Target HLA Sequence complement
tcagaccaccaagcacaagt

SEQ ID NO: 10192 - DNA, 20 bp, Artificial Sequence
  Target HLA Sequence complement
cagaccaccaagcacaagtg

SEQ ID NO: 10193 - DNA, 20 bp, Artificial Sequence
  Target HLA Sequence complement
agaccaccaagcacaagtgg

SEQ ID NO: 10194 - DNA, 20 bp, Artificial Sequence
  Target HLA Sequence complement
accaccaagcacaagtggga

SEQ ID NO: 10195 - DNA, 20 bp, Artificial Sequence
  Target HLA Sequence complement
atgtggcggagcagttgaga

SEQ ID NO: 10196 - DNA, 20 bp, Artificial Sequence
  Target HLA Sequence complement
gagcagttgagagcctacct

SEQ ID NO: 10197 - DNA, 20 bp, Artificial Sequence
  Target HLA Sequence complement
agcagttgagagcctacctg

SEQ ID NO: 10198 - DNA, 20 bp, Artificial Sequence
  Target HLA Sequence complement
cagttgagagcctacctgga

SEQ ID NO: 10199 - DNA, 20 bp, Artificial Sequence
  Target HLA Sequence complement
agttgagagcctacctggag

SEQ ID NO: 10200 - DNA, 20 bp, Artificial Sequence
  Target HLA Sequence complement
ctccgcagatacctggagaa

SEQ ID NO: 10201 - DNA, 20 bp, Artificial Sequence
  Target HLA Sequence complement
tccgcagatacctggagaac

SEQ ID NO: 10202 - DNA, 20 bp, Artificial Sequence
  Target HLA Sequence complement
cagatacctggagaacggga

SEQ ID NO: 10203 - DNA, 20 bp, Artificial Sequence
  Target HLA Sequence complement
agatacctggagaacgggaa

SEQ ID NO: 10204 - DNA, 20 bp, Artificial Sequence
  Target HLA Sequence complement
atacctggagaacgggaagg

SEQ ID NO: 10205 - DNA, 20 bp, Artificial Sequence
  Target HLA Sequence complement
tacctggagaacgggaagga

SEQ ID NO: 10206 - DNA, 20 bp, Artificial Sequence
  Target HLA Sequence complement
aaacgcatatgactcaccac

SEQ ID NO: 10207 - DNA, 20 bp, Artificial Sequence
  Target HLA Sequence complement
aacgcatatgactcaccacg

SEQ ID NO: 10208 - DNA, 20 bp, Artificial Sequence
  Target HLA Sequence complement
acgcatatgactcaccacgc

SEQ ID NO: 10209 - DNA, 20 bp, Artificial Sequence
  Target HLA Sequence complement
cgcatatgactcaccacgct

SEQ ID NO: 10210 - DNA, 20 bp, Artificial Sequence
  Target HLA Sequence complement
gcatatgactcaccacgctg

SEQ ID NO: 10211 - DNA, 20 bp, Artificial Sequence
  Target HLA Sequence complement
catatgactcaccacgctgt

SEQ ID NO: 10212 - DNA, 20 bp, Artificial Sequence
  Target HLA Sequence complement
atatgactcaccacgctgtc

SEQ ID NO: 10213 - DNA, 20 bp, Artificial Sequence
  Target HLA Sequence complement
tatgactcaccacgctgtct

SEQ ID NO: 10214 - DNA, 20 bp, Artificial Sequence
  Target HLA Sequence complement
atgactcaccacgctgtctc

SEQ ID NO: 10215 - DNA, 20 bp, Artificial Sequence
  Target HLA Sequence complement
tgactcaccacgctgtctct

SEQ ID NO: 10216 - DNA, 20 bp, Artificial Sequence
  Target HLA Sequence complement
actcaccacgctgtctctga

SEQ ID NO: 10217 - DNA, 20 bp, Artificial Sequence
  Target HLA Sequence complement
accacgctgtctctgaccat

SEQ ID NO: 10218 - DNA, 20 bp, Artificial Sequence
  Target HLA Sequence complement
cacgctgtctctgaccatga

SEQ ID NO: 10219 - DNA, 20 bp, Artificial Sequence
  Target HLA Sequence complement
acgctgtctctgaccatgaa

SEQ ID NO: 10220 - DNA, 20 bp, Artificial Sequence
  Target HLA Sequence complement
cgctgtctctgaccatgaag

SEQ ID NO: 10221 - DNA, 20 bp, Artificial Sequence
  Target HLA Sequence complement
gctgtctctgaccatgaagc

SEQ ID NO: 10222 - DNA, 20 bp, Artificial Sequence
  Target HLA Sequence complement
ctgtctctgaccatgaagcc

SEQ ID NO: 10223 - DNA, 20 bp, Artificial Sequence
  Target HLA Sequence complement
tgtctctgaccatgaagcca

SEQ ID NO: 10224 - DNA, 20 bp, Artificial Sequence
  Target HLA Sequence complement
gtctctgaccatgaagccac

SEQ ID NO: 10225 - DNA, 20 bp, Artificial Sequence
  Target HLA Sequence complement
tctctgaccatgaagccacc

SEQ ID NO: 10226 - DNA, 20 bp, Artificial Sequence
  Target HLA Sequence complement
tctgaccatgaagccaccct

SEQ ID NO: 10227 - DNA, 20 bp, Artificial Sequence
  Target HLA Sequence complement
tgaccatgaagccaccctga

SEQ ID NO: 10228 - DNA, 20 bp, Artificial Sequence
  Target HLA Sequence complement
agcttctaccctgcggagat

SEQ ID NO: 10229 - DNA, 20 bp, Artificial Sequence
  Target HLA Sequence complement
cttctaccctgcggagatca

SEQ ID NO: 10230 - DNA, 20 bp, Artificial Sequence
  Target HLA Sequence complement
ttctaccctgcggagatcac

SEQ ID NO: 10231 - DNA, 20 bp, Artificial Sequence
  Target HLA Sequence complement
tctaccctgcggagatcaca

SEQ ID NO: 10232 - DNA, 20 bp, Artificial Sequence
  Target HLA Sequence complement
taccctgcggagatcacact

SEQ ID NO: 10233 - DNA, 20 bp, Artificial Sequence
  Target HLA Sequence complement
tgcggagatcacactgacct

SEQ ID NO: 10234 - DNA, 20 bp, Artificial Sequence
  Target HLA Sequence complement
gagatcacactgacctggca

SEQ ID NO: 10235 - DNA, 20 bp, Artificial Sequence
  Target HLA Sequence complement
agatcacactgacctggcag

SEQ ID NO: 10236 - DNA, 20 bp, Artificial Sequence
  Target HLA Sequence complement
gggatggaaccttccagaag

SEQ ID NO: 10237 - DNA, 20 bp, Artificial Sequence
  Target HLA Sequence complement
ggatggaaccttccagaagt

SEQ ID NO: 10238 - DNA, 20 bp, Artificial Sequence
  Target HLA Sequence complement
gatggaaccttccagaagtg

SEQ ID NO: 10239 - DNA, 20 bp, Artificial Sequence
  Target HLA Sequence complement
atggaaccttccagaagtgg

SEQ ID NO: 10240 - DNA, 20 bp, Artificial Sequence
  Target HLA Sequence complement
tggaaccttccagaagtggg

SEQ ID NO: 10241 - DNA, 20 bp, Artificial Sequence
  Target HLA Sequence complement
cttctggacaggagcagaga

SEQ ID NO: 10242 - DNA, 20 bp, Artificial Sequence
  Target HLA Sequence complement
ttctggacaggagcagagat

SEQ ID NO: 10243 - DNA, 20 bp, Artificial Sequence
  Target HLA Sequence complement
tctggacaggagcagagata

SEQ ID NO: 10244 - DNA, 20 bp, Artificial Sequence
  Target HLA Sequence complement
ctggacaggagcagagatac

SEQ ID NO: 10245 - DNA, 20 bp, Artificial Sequence
  Target HLA Sequence complement
tggacaggagcagagataca

SEQ ID NO: 10246 - DNA, 20 bp, Artificial Sequence
  Target HLA Sequence complement
ggacaggagcagagatacac

SEQ ID NO: 10247 - DNA, 20 bp, Artificial Sequence
  Target HLA Sequence complement
gacaggagcagagatacacc

SEQ ID NO: 10248 - DNA, 20 bp, Artificial Sequence
  Target HLA Sequence complement
acaggagcagagatacacct

SEQ ID NO: 10249 - DNA, 20 bp, Artificial Sequence
  Target HLA Sequence complement
caggagcagagatacacctg

SEQ ID NO: 10250 - DNA, 20 bp, Artificial Sequence
  Target HLA Sequence complement
aggagcagagatacacctgc

SEQ ID NO: 10251 - DNA, 20 bp, Artificial Sequence
  Target HLA Sequence complement
gagcagagatacacctgcca

SEQ ID NO: 10252 - DNA, 20 bp, Artificial Sequence
  Target HLA Sequence complement
agcagagatacacctgccat

SEQ ID NO: 10253 - DNA, 20 bp, Artificial Sequence
  Target HLA Sequence complement
gcagagatacacctgccatg

SEQ ID NO: 10254 - DNA, 20 bp, Artificial Sequence
  Target HLA Sequence complement
cagagatacacctgccatgt

SEQ ID NO: 10255 - DNA, 20 bp, Artificial Sequence
  Target HLA Sequence complement
agagatacacctgccatgtg

SEQ ID NO: 10256 - DNA, 20 bp, Artificial Sequence
  Target HLA Sequence complement
gagatacacctgccatgtgc

SEQ ID NO: 10257 - DNA, 20 bp, Artificial Sequence
  Target HLA Sequence complement
agatacacctgccatgtgca

SEQ ID NO: 10258 - DNA, 20 bp, Artificial Sequence
  Target HLA Sequence complement
gatacacctgccatgtgcag

SEQ ID NO: 10259 - DNA, 20 bp, Artificial Sequence
  Target HLA Sequence complement
atacacctgccatgtgcagc

SEQ ID NO: 10260 - DNA, 20 bp, Artificial Sequence
  Target HLA Sequence complement
tacacctgccatgtgcagca

SEQ ID NO: 10261 - DNA, 20 bp, Artificial Sequence
  Target HLA Sequence complement
acacctgccatgtgcagcat

SEQ ID NO: 10262 - DNA, 20 bp, Artificial Sequence
  Target HLA Sequence complement
acctgccatgtgcagcatga

SEQ ID NO: 10263 - DNA, 20 bp, Artificial Sequence
  Target HLA Sequence complement
ccatgtgcagcatgagggtt

SEQ ID NO: 10264 - DNA, 20 bp, Artificial Sequence
  Target HLA Sequence complement
catgtgcagcatgagggttt

SEQ ID NO: 10265 - DNA, 20 bp, Artificial Sequence
  Target HLA Sequence complement
atgtgcagcatgagggtttg

SEQ ID NO: 10266 - DNA, 20 bp, Artificial Sequence
  Target HLA Sequence complement
tgtgcagcatgagggtttgc

SEQ ID NO: 10267 - DNA, 20 bp, Artificial Sequence
  Target HLA Sequence complement
cagcatgagggtttgcccaa

SEQ ID NO: 10268 - DNA, 20 bp, Artificial Sequence
  Target HLA Sequence complement
agcatgagggtttgcccaag

SEQ ID NO: 10269 - DNA, 20 bp, Artificial Sequence
  Target HLA Sequence complement
ccatcgtgggcatcattgct

SEQ ID NO: 10270 - DNA, 20 bp, Artificial Sequence
  Target HLA Sequence complement
catcgtgggcatcattgctg

SEQ ID NO: 10271 - DNA, 20 bp, Artificial Sequence
  Target HLA Sequence complement
atcgtgggcatcattgctgg

SEQ ID NO: 10272 - DNA, 20 bp, Artificial Sequence
  Target HLA Sequence complement
gcatcattgctggcctggtt

SEQ ID NO: 10273 - DNA, 20 bp, Artificial Sequence
  Target HLA Sequence complement
catcattgctggcctggttc

SEQ ID NO: 10274 - DNA, 20 bp, Artificial Sequence
  Target HLA Sequence complement
atcattgctggcctggttct

SEQ ID NO: 10275 - DNA, 20 bp, Artificial Sequence
  Target HLA Sequence complement
tcattgctggcctggttctc

SEQ ID NO: 10276 - DNA, 20 bp, Artificial Sequence
  Target HLA Sequence complement
cattgctggcctggttctct

SEQ ID NO: 10277 - DNA, 20 bp, Artificial Sequence
  Target HLA Sequence complement
attgctggcctggttctctt

SEQ ID NO: 10278 - DNA, 20 bp, Artificial Sequence
  Target HLA Sequence complement
ttgctggcctggttctcttt

SEQ ID NO: 10279 - DNA, 20 bp, Artificial Sequence
  Target HLA Sequence complement
tgctggcctggttctctttg

SEQ ID NO: 10280 - DNA, 20 bp, Artificial Sequence
  Target HLA Sequence complement
ctggcctggttctctttgga

SEQ ID NO: 10281 - DNA, 20 bp, Artificial Sequence
  Target HLA Sequence complement
tggcctggttctctttggag

SEQ ID NO: 10282 - DNA, 20 bp, Artificial Sequence
  Target HLA Sequence complement
gcctggttctctttggagct

SEQ ID NO: 10283 - DNA, 20 bp, Artificial Sequence
  Target HLA Sequence complement
cctggttctctttggagctg

SEQ ID NO: 10284 - DNA, 20 bp, Artificial Sequence
  Target HLA Sequence complement
ctggttctctttggagctgt

SEQ ID NO: 10285 - DNA, 20 bp, Artificial Sequence
  Target HLA Sequence complement
tggttctctttggagctgtg

SEQ ID NO: 10286 - DNA, 20 bp, Artificial Sequence
  Target HLA Sequence complement
ggttctctttggagctgtga

SEQ ID NO: 10287 - DNA, 20 bp, Artificial Sequence
  Target HLA Sequence complement
gttctctttggagctgtgat

SEQ ID NO: 10288 - DNA, 20 bp, Artificial Sequence
  Target HLA Sequence complement
ttctctttggagctgtgatc

SEQ ID NO: 10289 - DNA, 20 bp, Artificial Sequence
  Target HLA Sequence complement
tctctttggagctgtgatca

SEQ ID NO: 10290 - DNA, 20 bp, Artificial Sequence
  Target HLA Sequence complement
ctctttggagctgtgatcac

SEQ ID NO: 10291 - DNA, 20 bp, Artificial Sequence
  Target HLA Sequence complement
tctttggagctgtgatcact

SEQ ID NO: 10292 - DNA, 20 bp, Artificial Sequence
  Target HLA Sequence complement
ctttggagctgtgatcactg

SEQ ID NO: 10293 - DNA, 20 bp, Artificial Sequence
  Target HLA Sequence complement
tttggagctgtgatcactgg

SEQ ID NO: 10294 - DNA, 20 bp, Artificial Sequence
  Target HLA Sequence complement
ttggagctgtgatcactgga

SEQ ID NO: 10295 - DNA, 20 bp, Artificial Sequence
  Target HLA Sequence complement
tggagctgtgatcactggag

SEQ ID NO: 10296 - DNA, 20 bp, Artificial Sequence
  Target HLA Sequence complement
gagctgtgatcactggagct

SEQ ID NO: 10297 - DNA, 20 bp, Artificial Sequence
  Target HLA Sequence complement
agctgtgatcactggagctg

SEQ ID NO: 10298 - DNA, 20 bp, Artificial Sequence
  Target HLA Sequence complement
gctgtgatcactggagctgt

SEQ ID NO: 10299 - DNA, 20 bp, Artificial Sequence
  Target HLA Sequence complement
ctgtgatcactggagctgtg

SEQ ID NO: 10300 - DNA, 20 bp, Artificial Sequence
  Target HLA Sequence complement
tgtgatcactggagctgtgg

SEQ ID NO: 10301 - DNA, 20 bp, Artificial Sequence
  Target HLA Sequence complement
gtgatcactggagctgtggt

SEQ ID NO: 10302 - DNA, 20 bp, Artificial Sequence
  Target HLA Sequence complement
tgatcactggagctgtggtc

SEQ ID NO: 10303 - DNA, 20 bp, Artificial Sequence
  Target HLA Sequence complement
tgtggtcgctgctgtgatgt

SEQ ID NO: 10304 - DNA, 20 bp, Artificial Sequence
  Target HLA Sequence complement
tgctgtgatgtggaggagga

SEQ ID NO: 10305 - DNA, 20 bp, Artificial Sequence
  Target HLA Sequence complement
gctgtgatgtggaggaggaa

SEQ ID NO: 10306 - DNA, 20 bp, Artificial Sequence
  Target HLA Sequence complement
ctgtgatgtggaggaggaag

SEQ ID NO: 10307 - DNA, 20 bp, Artificial Sequence
  Target HLA Sequence complement
tgtgatgtggaggaggaaga

SEQ ID NO: 10308 - DNA, 20 bp, Artificial Sequence
  Target HLA Sequence complement
gtgatgtggaggaggaagag

SEQ ID NO: 10309 - DNA, 20 bp, Artificial Sequence
  Target HLA Sequence complement
tgatgtggaggaggaagagc

SEQ ID NO: 10310 - DNA, 20 bp, Artificial Sequence
  Target HLA Sequence complement
gatgtggaggaggaagagct

SEQ ID NO: 10311 - DNA, 20 bp, Artificial Sequence
  Target HLA Sequence complement
atgtggaggaggaagagctc

SEQ ID NO: 10312 - DNA, 20 bp, Artificial Sequence
  Target HLA Sequence complement
tgtggaggaggaagagctca

SEQ ID NO: 10313 - DNA, 20 bp, Artificial Sequence
  Target HLA Sequence complement
tggaggaggaagagctcaga

SEQ ID NO: 10314 - DNA, 20 bp, Artificial Sequence
  Target HLA Sequence complement
ggaggaggaagagctcagat

SEQ ID NO: 10315 - DNA, 20 bp, Artificial Sequence
  Target HLA Sequence complement
gaggaggaagagctcagata

SEQ ID NO: 10316 - DNA, 20 bp, Artificial Sequence
  Target HLA Sequence complement
aggaggaagagctcagatag

SEQ ID NO: 10317 - DNA, 20 bp, Artificial Sequence
  Target HLA Sequence complement
ggaggaagagctcagataga

SEQ ID NO: 10318 - DNA, 20 bp, Artificial Sequence
  Target HLA Sequence complement
gaggaagagctcagatagaa

SEQ ID NO: 10319 - DNA, 20 bp, Artificial Sequence
  Target HLA Sequence complement
aggaagagctcagatagaaa

SEQ ID NO: 10320 - DNA, 20 bp, Artificial Sequence
  Target HLA Sequence complement
aaaggagggagctactctca

SEQ ID NO: 10321 - DNA, 20 bp, Artificial Sequence
  Target HLA Sequence complement
aaggagggagctactctcag

SEQ ID NO: 10322 - DNA, 20 bp, Artificial Sequence
  Target HLA Sequence complement
gagctactctcaggctgcaa

SEQ ID NO: 10323 - DNA, 20 bp, Artificial Sequence
  Target HLA Sequence complement
agctactctcaggctgcaag

SEQ ID NO: 10324 - DNA, 20 bp, Artificial Sequence
  Target HLA Sequence complement
ctactctcaggctgcaagca

SEQ ID NO: 10325 - DNA, 20 bp, Artificial Sequence
  Target HLA Sequence complement
tactctcaggctgcaagcag

SEQ ID NO: 10326 - DNA, 20 bp, Artificial Sequence
  Target HLA Sequence complement
actctcaggctgcaagcagt

SEQ ID NO: 10327 - DNA, 20 bp, Artificial Sequence
  Target HLA Sequence complement
tctcaggctgcaagcagtga

SEQ ID NO: 10328 - DNA, 20 bp, Artificial Sequence
  Target HLA Sequence complement
tcaggctgcaagcagtgaca

SEQ ID NO: 10329 - DNA, 20 bp, Artificial Sequence
  Target HLA Sequence complement
aggctgcaagcagtgacagt

SEQ ID NO: 10330 - DNA, 20 bp, Artificial Sequence
  Target HLA Sequence complement
cagggctctgatgtgtctct

SEQ ID NO: 10331 - DNA, 20 bp, Artificial Sequence
  Target HLA Sequence complement
agggctctgatgtgtctctc

SEQ ID NO: 10332 - DNA, 20 bp, Artificial Sequence
  Target HLA Sequence complement
gggctctgatgtgtctctca

SEQ ID NO: 10333 - DNA, 20 bp, Artificial Sequence
  Target HLA Sequence complement
ggctctgatgtgtctctcac

SEQ ID NO: 10334 - DNA, 20 bp, Artificial Sequence
  Target HLA Sequence complement
gctctgatgtgtctctcaca

SEQ ID NO: 10335 - DNA, 20 bp, Artificial Sequence
  Target HLA Sequence complement
ctctgatgtgtctctcacag

SEQ ID NO: 10336 - DNA, 20 bp, Artificial Sequence
  Target HLA Sequence complement
tctgatgtgtctctcacagc

SEQ ID NO: 10337 - DNA, 20 bp, Artificial Sequence
  Target HLA Sequence complement
ctgatgtgtctctcacagct

SEQ ID NO: 10338 - DNA, 20 bp, Artificial Sequence
  Target HLA Sequence complement
tgatgtgtctctcacagctt

SEQ ID NO: 10339 - DNA, 20 bp, Artificial Sequence
  Target HLA Sequence complement
gatgtgtctctcacagcttg

SEQ ID NO: 10340 - DNA, 20 bp, Artificial Sequence
  Target HLA Sequence complement
atgtgtctctcacagcttgt

SEQ ID NO: 10341 - DNA, 20 bp, Artificial Sequence
  Target HLA Sequence complement
tgtgtctctcacagcttgta

SEQ ID NO: 10342 - DNA, 20 bp, Artificial Sequence
  Target HLA Sequence complement
gtgtctctcacagcttgtaa

SEQ ID NO: 10343 - DNA, 20 bp, Artificial Sequence
  Target HLA Sequence complement
tgtctctcacagcttgtaaa

SEQ ID NO: 10344 - DNA, 20 bp, Artificial Sequence
  Target HLA Sequence complement
gtctctcacagcttgtaaag

SEQ ID NO: 10345 - DNA, 20 bp, Artificial Sequence
  Target HLA Sequence complement
tctctcacagcttgtaaagt

SEQ ID NO: 10346 - DNA, 20 bp, Artificial Sequence
  Target HLA Sequence complement
ctctcacagcttgtaaagtg

SEQ ID NO: 10347 - DNA, 20 bp, Artificial Sequence
  Target HLA Sequence complement
tctcacagcttgtaaagtgt

SEQ ID NO: 10348 - DNA, 20 bp, Artificial Sequence
  Target HLA Sequence complement
ctcacagcttgtaaagtgtg

SEQ ID NO: 10349 - DNA, 20 bp, Artificial Sequence
  Target HLA Sequence complement
tcacagcttgtaaagtgtga

SEQ ID NO: 10350 - DNA, 20 bp, Artificial Sequence
  Target HLA Sequence complement
cacagcttgtaaagtgtgag

SEQ ID NO: 10351 - DNA, 20 bp, Artificial Sequence
  Target HLA Sequence complement
acagcttgtaaagtgtgaga

SEQ ID NO: 10352 - DNA, 20 bp, Artificial Sequence
  Target HLA Sequence complement
cagcttgtaaagtgtgagac

SEQ ID NO: 10353 - DNA, 20 bp, Artificial Sequence
  Target HLA Sequence complement
agcttgtaaagtgtgagaca

SEQ ID NO: 10354 - DNA, 20 bp, Artificial Sequence
  Target HLA Sequence complement
gcttgtaaagtgtgagacag

SEQ ID NO: 10355 - DNA, 20 bp, Artificial Sequence
  Target HLA Sequence complement
cttgtaaagtgtgagacagc

SEQ ID NO: 10356 - DNA, 20 bp, Artificial Sequence
  Target HLA Sequence complement
ttgtaaagtgtgagacagct

SEQ ID NO: 10357 - DNA, 20 bp, Artificial Sequence
  Target HLA Sequence complement
tgtaaagtgtgagacagctg

SEQ ID NO: 10358 - DNA, 20 bp, Artificial Sequence
  Target HLA Sequence complement
gtaaagtgtgagacagctgc

SEQ ID NO: 10359 - DNA, 20 bp, Artificial Sequence
  Target HLA Sequence complement
taaagtgtgagacagctgcc

SEQ ID NO: 10360 - DNA, 20 bp, Artificial Sequence
  Target HLA Sequence complement
aaagtgtgagacagctgcct

SEQ ID NO: 10361 - DNA, 20 bp, Artificial Sequence
  Target HLA Sequence complement
aagtgtgagacagctgcctt

SEQ ID NO: 10362 - DNA, 20 bp, Artificial Sequence
  Target HLA Sequence complement
agtgtgagacagctgccttg

SEQ ID NO: 10363 - DNA, 20 bp, Artificial Sequence
  Target HLA Sequence complement
gtgtgagacagctgccttgt

SEQ ID NO: 10364 - DNA, 20 bp, Artificial Sequence
  Target HLA Sequence complement
tgtgagacagctgccttgtg

SEQ ID NO: 10365 - DNA, 20 bp, Artificial Sequence
  Target HLA Sequence complement
gtgagacagctgccttgtgt

SEQ ID NO: 10366 - DNA, 20 bp, Artificial Sequence
  Target HLA Sequence complement
tgagacagctgccttgtgtg

SEQ ID NO: 10367 - DNA, 20 bp, Artificial Sequence
  Target HLA Sequence complement
tgccttgtgtgggactgaga

SEQ ID NO: 10368 - DNA, 20 bp, Artificial Sequence
  Target HLA Sequence complement
ttgtgtgggactgagaggca

SEQ ID NO: 10369 - DNA, 20 bp, Artificial Sequence
  Target HLA Sequence complement
tgtgtgggactgagaggcaa

SEQ ID NO: 10370 - DNA, 20 bp, Artificial Sequence
  Target HLA Sequence complement
tgtgggactgagaggcaaga

SEQ ID NO: 10371 - DNA, 20 bp, Artificial Sequence
  Target HLA Sequence complement
tgggactgagaggcaagagt

SEQ ID NO: 10372 - DNA, 20 bp, Artificial Sequence
  Target HLA Sequence complement
gggactgagaggcaagagtt

SEQ ID NO: 10373 - DNA, 20 bp, Artificial Sequence
  Target HLA Sequence complement
ggactgagaggcaagagttg

SEQ ID NO: 10374 - DNA, 20 bp, Artificial Sequence
  Target HLA Sequence complement
gactgagaggcaagagttgt

SEQ ID NO: 10375 - DNA, 20 bp, Artificial Sequence
  Target HLA Sequence complement
actgagaggcaagagttgtt

SEQ ID NO: 10376 - DNA, 20 bp, Artificial Sequence
  Target HLA Sequence complement
ctgagaggcaagagttgttc

SEQ ID NO: 10377 - DNA, 20 bp, Artificial Sequence
  Target HLA Sequence complement
tgagaggcaagagttgttcc

SEQ ID NO: 10378 - DNA, 20 bp, Artificial Sequence
  Target HLA Sequence complement
gagaggcaagagttgttcct

SEQ ID NO: 10379 - DNA, 20 bp, Artificial Sequence
  Target HLA Sequence complement
agaggcaagagttgttcctg

SEQ ID NO: 10380 - DNA, 20 bp, Artificial Sequence
  Target HLA Sequence complement
gaggcaagagttgttcctgc

SEQ ID NO: 10381 - DNA, 20 bp, Artificial Sequence
  Target HLA Sequence complement
aggcaagagttgttcctgcc

SEQ ID NO: 10382 - DNA, 20 bp, Artificial Sequence
  Target HLA Sequence complement
gcaagagttgttcctgccct

SEQ ID NO: 10383 - DNA, 20 bp, Artificial Sequence
  Target HLA Sequence complement
caagagttgttcctgccctt

SEQ ID NO: 10384 - DNA, 20 bp, Artificial Sequence
  Target HLA Sequence complement
aagagttgttcctgcccttc

SEQ ID NO: 10385 - DNA, 20 bp, Artificial Sequence
  Target HLA Sequence complement
agagttgttcctgcccttcc

SEQ ID NO: 10386 - DNA, 20 bp, Artificial Sequence
  Target HLA Sequence complement
agttgttcctgcccttccct

SEQ ID NO: 10387 - DNA, 20 bp, Artificial Sequence
  Target HLA Sequence complement
gttgttcctgcccttccctt

SEQ ID NO: 10388 - DNA, 20 bp, Artificial Sequence
  Target HLA Sequence complement
ttgttcctgcccttcccttt

SEQ ID NO: 10389 - DNA, 20 bp, Artificial Sequence
  Target HLA Sequence complement
tgttcctgcccttccctttg

SEQ ID NO: 10390 - DNA, 20 bp, Artificial Sequence
  Target HLA Sequence complement
gttcctgcccttccctttgt

SEQ ID NO: 10391 - DNA, 20 bp, Artificial Sequence
  Target HLA Sequence complement
ttcctgcccttccctttgtg

SEQ ID NO: 10392 - DNA, 20 bp, Artificial Sequence
  Target HLA Sequence complement
tcctgcccttccctttgtga

SEQ ID NO: 10393 - DNA, 20 bp, Artificial Sequence
  Target HLA Sequence complement
ctgcccttccctttgtgact

SEQ ID NO: 10394 - DNA, 20 bp, Artificial Sequence
  Target HLA Sequence complement
tgcccttccctttgtgactt

SEQ ID NO: 10395 - DNA, 20 bp, Artificial Sequence
  Target HLA Sequence complement
gcccttccctttgtgacttg

SEQ ID NO: 10396 - DNA, 20 bp, Artificial Sequence
  Target HLA Sequence complement
cccttccctttgtgacttga

SEQ ID NO: 10397 - DNA, 20 bp, Artificial Sequence
  Target HLA Sequence complement
ccttccctttgtgacttgaa

SEQ ID NO: 10398 - DNA, 20 bp, Artificial Sequence
  Target HLA Sequence complement
cttccctttgtgacttgaag

SEQ ID NO: 10399 - DNA, 20 bp, Artificial Sequence
  Target HLA Sequence complement
ttccctttgtgacttgaaga

SEQ ID NO: 10400 - DNA, 20 bp, Artificial Sequence
  Target HLA Sequence complement
tccctttgtgacttgaagaa

SEQ ID NO: 10401 - DNA, 20 bp, Artificial Sequence
  Target HLA Sequence complement
ccctttgtgacttgaagaac

SEQ ID NO: 10402 - DNA, 20 bp, Artificial Sequence
  Target HLA Sequence complement
cctttgtgacttgaagaacc

SEQ ID NO: 10403 - DNA, 20 bp, Artificial Sequence
  Target HLA Sequence complement
ctttgtgacttgaagaaccc

SEQ ID NO: 10404 - DNA, 20 bp, Artificial Sequence
  Target HLA Sequence complement
tttgtgacttgaagaaccct

SEQ ID NO: 10405 - DNA, 20 bp, Artificial Sequence
  Target HLA Sequence complement
ttgtgacttgaagaaccctg

SEQ ID NO: 10406 - DNA, 20 bp, Artificial Sequence
  Target HLA Sequence complement
tgtgacttgaagaaccctga

SEQ ID NO: 10407 - DNA, 20 bp, Artificial Sequence
  Target HLA Sequence complement
gtgacttgaagaaccctgac

SEQ ID NO: 10408 - DNA, 20 bp, Artificial Sequence
  Target HLA Sequence complement
tgacttgaagaaccctgact

SEQ ID NO: 10409 - DNA, 20 bp, Artificial Sequence
  Target HLA Sequence complement
gacttgaagaaccctgactt

SEQ ID NO: 10410 - DNA, 20 bp, Artificial Sequence
  Target HLA Sequence complement
acttgaagaaccctgacttt

SEQ ID NO: 10411 - DNA, 20 bp, Artificial Sequence
  Target HLA Sequence complement
cttgaagaaccctgactttg

SEQ ID NO: 10412 - DNA, 20 bp, Artificial Sequence
  Target HLA Sequence complement
ttgaagaaccctgactttgt

SEQ ID NO: 10413 - DNA, 20 bp, Artificial Sequence
  Target HLA Sequence complement
tgaagaaccctgactttgtt

SEQ ID NO: 10414 - DNA, 20 bp, Artificial Sequence
  Target HLA Sequence complement
gaagaaccctgactttgttt

SEQ ID NO: 10415 - DNA, 20 bp, Artificial Sequence
  Target HLA Sequence complement
aagaaccctgactttgtttc

SEQ ID NO: 10416 - DNA, 20 bp, Artificial Sequence
  Target HLA Sequence complement
agaaccctgactttgtttct

SEQ ID NO: 10417 - DNA, 20 bp, Artificial Sequence
  Target HLA Sequence complement
gaaccctgactttgtttctg

SEQ ID NO: 10418 - DNA, 20 bp, Artificial Sequence
  Target HLA Sequence complement
aaccctgactttgtttctgc

SEQ ID NO: 10419 - DNA, 20 bp, Artificial Sequence
  Target HLA Sequence complement
accctgactttgtttctgca

SEQ ID NO: 10420 - DNA, 20 bp, Artificial Sequence
  Target HLA Sequence complement
ccctgactttgtttctgcaa

SEQ ID NO: 10421 - DNA, 20 bp, Artificial Sequence
  Target HLA Sequence complement
cctgactttgtttctgcaaa

SEQ ID NO: 10422 - DNA, 20 bp, Artificial Sequence
  Target HLA Sequence complement
ctgactttgtttctgcaaag

SEQ ID NO: 10423 - DNA, 20 bp, Artificial Sequence
  Target HLA Sequence complement
tgactttgtttctgcaaagg

SEQ ID NO: 10424 - DNA, 20 bp, Artificial Sequence
  Target HLA Sequence complement
gactttgtttctgcaaaggc

SEQ ID NO: 10425 - DNA, 20 bp, Artificial Sequence
  Target HLA Sequence complement
actttgtttctgcaaaggca

SEQ ID NO: 10426 - DNA, 20 bp, Artificial Sequence
  Target HLA Sequence complement
ctttgtttctgcaaaggcac

SEQ ID NO: 10427 - DNA, 20 bp, Artificial Sequence
  Target HLA Sequence complement
tttgtttctgcaaaggcacc

SEQ ID NO: 10428 - DNA, 20 bp, Artificial Sequence
  Target HLA Sequence complement
ttgtttctgcaaaggcacct

SEQ ID NO: 10429 - DNA, 20 bp, Artificial Sequence
  Target HLA Sequence complement
tgtttctgcaaaggcacctg

SEQ ID NO: 10430 - DNA, 20 bp, Artificial Sequence
  Target HLA Sequence complement
gtttctgcaaaggcacctgc

SEQ ID NO: 10431 - DNA, 20 bp, Artificial Sequence
  Target HLA Sequence complement
tttctgcaaaggcacctgca

SEQ ID NO: 10432 - DNA, 20 bp, Artificial Sequence
  Target HLA Sequence complement
ttctgcaaaggcacctgcat

SEQ ID NO: 10433 - DNA, 20 bp, Artificial Sequence
  Target HLA Sequence complement
tctgcaaaggcacctgcatg

SEQ ID NO: 10434 - DNA, 20 bp, Artificial Sequence
  Target HLA Sequence complement
ctgcaaaggcacctgcatgt

SEQ ID NO: 10435 - DNA, 20 bp, Artificial Sequence
  Target HLA Sequence complement
tgcaaaggcacctgcatgtg

SEQ ID NO: 10436 - DNA, 20 bp, Artificial Sequence
  Target HLA Sequence complement
gcaaaggcacctgcatgtgt

SEQ ID NO: 10437 - DNA, 20 bp, Artificial Sequence
  Target HLA Sequence complement
caaaggcacctgcatgtgtc

SEQ ID NO: 10438 - DNA, 20 bp, Artificial Sequence
  Target HLA Sequence complement
aaaggcacctgcatgtgtct

SEQ ID NO: 10439 - DNA, 20 bp, Artificial Sequence
  Target HLA Sequence complement
aaggcacctgcatgtgtctg

SEQ ID NO: 10440 - DNA, 20 bp, Artificial Sequence
  Target HLA Sequence complement
aggcacctgcatgtgtctgt

SEQ ID NO: 10441 - DNA, 20 bp, Artificial Sequence
  Target HLA Sequence complement
gcacctgcatgtgtctgtgt

SEQ ID NO: 10442 - DNA, 20 bp, Artificial Sequence
  Target HLA Sequence complement
cacctgcatgtgtctgtgtt

SEQ ID NO: 10443 - DNA, 20 bp, Artificial Sequence
  Target HLA Sequence complement
acctgcatgtgtctgtgttc

SEQ ID NO: 10444 - DNA, 20 bp, Artificial Sequence
  Target HLA Sequence complement
cctgcatgtgtctgtgttcg

SEQ ID NO: 10445 - DNA, 20 bp, Artificial Sequence
  Target HLA Sequence complement
ctgcatgtgtctgtgttcgt

SEQ ID NO: 10446 - DNA, 20 bp, Artificial Sequence
  Target HLA Sequence complement
tgcatgtgtctgtgttcgtg

SEQ ID NO: 10447 - DNA, 20 bp, Artificial Sequence
  Target HLA Sequence complement
gcatgtgtctgtgttcgtgt

SEQ ID NO: 10448 - DNA, 20 bp, Artificial Sequence
  Target HLA Sequence complement
catgtgtctgtgttcgtgta

SEQ ID NO: 10449 - DNA, 20 bp, Artificial Sequence
  Target HLA Sequence complement
atgtgtctgtgttcgtgtag

SEQ ID NO: 10450 - DNA, 20 bp, Artificial Sequence
  Target HLA Sequence complement
tgtgtctgtgttcgtgtagg

SEQ ID NO: 10451 - DNA, 20 bp, Artificial Sequence
  Target HLA Sequence complement
gtgtctgtgttcgtgtaggc

SEQ ID NO: 10452 - DNA, 20 bp, Artificial Sequence
  Target HLA Sequence complement
tgtctgtgttcgtgtaggca

SEQ ID NO: 10453 - DNA, 20 bp, Artificial Sequence
  Target HLA Sequence complement
gtctgtgttcgtgtaggcat

SEQ ID NO: 10454 - DNA, 20 bp, Artificial Sequence
  Target HLA Sequence complement
tctgtgttcgtgtaggcata

SEQ ID NO: 10455 - DNA, 20 bp, Artificial Sequence
  Target HLA Sequence complement
ctgtgttcgtgtaggcataa

SEQ ID NO: 10456 - DNA, 20 bp, Artificial Sequence
  Target HLA Sequence complement
tgtgttcgtgtaggcataat

SEQ ID NO: 10457 - DNA, 20 bp, Artificial Sequence
  Target HLA Sequence complement
gtgttcgtgtaggcataatg

SEQ ID NO: 10458 - DNA, 20 bp, Artificial Sequence
  Target HLA Sequence complement
tgttcgtgtaggcataatgt

SEQ ID NO: 10459 - DNA, 20 bp, Artificial Sequence
  Target HLA Sequence complement
gttcgtgtaggcataatgtg

SEQ ID NO: 10460 - DNA, 20 bp, Artificial Sequence
  Target HLA Sequence complement
ttcgtgtaggcataatgtga

SEQ ID NO: 10461 - DNA, 20 bp, Artificial Sequence
  Target HLA Sequence complement
tcgtgtaggcataatgtgag

SEQ ID NO: 10462 - DNA, 20 bp, Artificial Sequence
  Target HLA Sequence complement
cgtgtaggcataatgtgagg

SEQ ID NO: 10463 - DNA, 20 bp, Artificial Sequence
  Target HLA Sequence complement
gtgtaggcataatgtgagga

SEQ ID NO: 10464 - DNA, 20 bp, Artificial Sequence
  Target HLA Sequence complement
tgtaggcataatgtgaggag

SEQ ID NO: 10465 - DNA, 20 bp, Artificial Sequence
  Target HLA Sequence complement
gtaggcataatgtgaggagg

SEQ ID NO: 10466 - DNA, 20 bp, Artificial Sequence
  Target HLA Sequence complement
taggcataatgtgaggaggt

SEQ ID NO: 10467 - DNA, 20 bp, Artificial Sequence
  Target HLA Sequence complement
aggcataatgtgaggaggtg

SEQ ID NO: 10468 - DNA, 20 bp, Artificial Sequence
  Target HLA Sequence complement
ggcataatgtgaggaggtgg

SEQ ID NO: 10469 - DNA, 20 bp, Artificial Sequence
  Target HLA Sequence complement
gcataatgtgaggaggtggg

SEQ ID NO: 10470 - DNA, 20 bp, Artificial Sequence
  Target HLA Sequence complement
catgtccaccatgaccctct

SEQ ID NO: 10471 - DNA, 20 bp, Artificial Sequence
  Target HLA Sequence complement
atgtccaccatgaccctctt

SEQ ID NO: 10472 - DNA, 20 bp, Artificial Sequence
  Target HLA Sequence complement
tgtccaccatgaccctcttc

SEQ ID NO: 10473 - DNA, 20 bp, Artificial Sequence
  Target HLA Sequence complement
cccaatcatctttcctgttc

SEQ ID NO: 10474 - DNA, 20 bp, Artificial Sequence
  Target HLA Sequence complement
ccaatcatctttcctgttcc

SEQ ID NO: 10475 - DNA, 20 bp, Artificial Sequence
  Target HLA Sequence complement
caatcatctttcctgttcca

SEQ ID NO: 10476 - DNA, 20 bp, Artificial Sequence
  Target HLA Sequence complement
aatcatctttcctgttccag

SEQ ID NO: 10477 - DNA, 20 bp, Artificial Sequence
  Target HLA Sequence complement
atcatctttcctgttccaga

SEQ ID NO: 10478 - DNA, 20 bp, Artificial Sequence
  Target HLA Sequence complement
tcatctttcctgttccagag

SEQ ID NO: 10479 - DNA, 20 bp, Artificial Sequence
  Target HLA Sequence complement
catctttcctgttccagaga

SEQ ID NO: 10480 - DNA, 20 bp, Artificial Sequence
  Target HLA Sequence complement
atctttcctgttccagagag

SEQ ID NO: 10481 - DNA, 20 bp, Artificial Sequence
  Target HLA Sequence complement
tctttcctgttccagagagg

SEQ ID NO: 10482 - DNA, 20 bp, Artificial Sequence
  Target HLA Sequence complement
ctttcctgttccagagaggt

SEQ ID NO: 10483 - DNA, 20 bp, Artificial Sequence
  Target HLA Sequence complement
tttcctgttccagagaggtg

SEQ ID NO: 10484 - DNA, 20 bp, Artificial Sequence
  Target HLA Sequence complement
ttcctgttccagagaggtgg

SEQ ID NO: 10485 - DNA, 20 bp, Artificial Sequence
  Target HLA Sequence complement
gctgaggtgtctccatctct

SEQ ID NO: 10486 - DNA, 20 bp, Artificial Sequence
  Target HLA Sequence complement
ctgaggtgtctccatctctg

SEQ ID NO: 10487 - DNA, 20 bp, Artificial Sequence
  Target HLA Sequence complement
tgaggtgtctccatctctgt

SEQ ID NO: 10488 - DNA, 20 bp, Artificial Sequence
  Target HLA Sequence complement
gaggtgtctccatctctgtc

SEQ ID NO: 10489 - DNA, 20 bp, Artificial Sequence
  Target HLA Sequence complement
aggtgtctccatctctgtct

SEQ ID NO: 10490 - DNA, 20 bp, Artificial Sequence
  Target HLA Sequence complement
ggtgtctccatctctgtctc

SEQ ID NO: 10491 - DNA, 20 bp, Artificial Sequence
  Target HLA Sequence complement
gtgtctccatctctgtctca

SEQ ID NO: 10492 - DNA, 20 bp, Artificial Sequence
  Target HLA Sequence complement
tgtctccatctctgtctcaa

SEQ ID NO: 10493 - DNA, 20 bp, Artificial Sequence
  Target HLA Sequence complement
gtctccatctctgtctcaac

SEQ ID NO: 10494 - DNA, 20 bp, Artificial Sequence
  Target HLA Sequence complement
tctccatctctgtctcaact

SEQ ID NO: 10495 - DNA, 20 bp, Artificial Sequence
  Target HLA Sequence complement
ctccatctctgtctcaactt

SEQ ID NO: 10496 - DNA, 20 bp, Artificial Sequence
  Target HLA Sequence complement
tccatctctgtctcaacttc

SEQ ID NO: 10497 - DNA, 20 bp, Artificial Sequence
  Target HLA Sequence complement
ccatctctgtctcaacttca

SEQ ID NO: 10498 - DNA, 20 bp, Artificial Sequence
  Target HLA Sequence complement
catctctgtctcaacttcat

SEQ ID NO: 10499 - DNA, 20 bp, Artificial Sequence
  Target HLA Sequence complement
atctctgtctcaacttcatg

SEQ ID NO: 10500 - DNA, 20 bp, Artificial Sequence
  Target HLA Sequence complement
tctctgtctcaacttcatgg

SEQ ID NO: 10501 - DNA, 20 bp, Artificial Sequence
  Target HLA Sequence complement
ctctgtctcaacttcatggt

SEQ ID NO: 10502 - DNA, 20 bp, Artificial Sequence
  Target HLA Sequence complement
tctgtctcaacttcatggtg

SEQ ID NO: 10503 - DNA, 20 bp, Artificial Sequence
  Target HLA Sequence complement
ctgtctcaacttcatggtgc

SEQ ID NO: 10504 - DNA, 20 bp, Artificial Sequence
  Target HLA Sequence complement
tgtctcaacttcatggtgca

SEQ ID NO: 10505 - DNA, 20 bp, Artificial Sequence
  Target HLA Sequence complement
gtctcaacttcatggtgcac

SEQ ID NO: 10506 - DNA, 20 bp, Artificial Sequence
  Target HLA Sequence complement
tctcaacttcatggtgcact

SEQ ID NO: 10507 - DNA, 20 bp, Artificial Sequence
  Target HLA Sequence complement
ctcaacttcatggtgcactg

SEQ ID NO: 10508 - DNA, 20 bp, Artificial Sequence
  Target HLA Sequence complement
tcaacttcatggtgcactga

SEQ ID NO: 10509 - DNA, 20 bp, Artificial Sequence
  Target HLA Sequence complement
caacttcatggtgcactgag

SEQ ID NO: 10510 - DNA, 20 bp, Artificial Sequence
  Target HLA Sequence complement
aacttcatggtgcactgagc

SEQ ID NO: 10511 - DNA, 20 bp, Artificial Sequence
  Target HLA Sequence complement
acttcatggtgcactgagct

SEQ ID NO: 10512 - DNA, 20 bp, Artificial Sequence
  Target HLA Sequence complement
cttcatggtgcactgagctg

SEQ ID NO: 10513 - DNA, 20 bp, Artificial Sequence
  Target HLA Sequence complement
ttcatggtgcactgagctgt

SEQ ID NO: 10514 - DNA, 20 bp, Artificial Sequence
  Target HLA Sequence complement
tcatggtgcactgagctgta

SEQ ID NO: 10515 - DNA, 20 bp, Artificial Sequence
  Target HLA Sequence complement
catggtgcactgagctgtaa

SEQ ID NO: 10516 - DNA, 20 bp, Artificial Sequence
  Target HLA Sequence complement
atggtgcactgagctgtaac

SEQ ID NO: 10517 - DNA, 20 bp, Artificial Sequence
  Target HLA Sequence complement
tggtgcactgagctgtaact

SEQ ID NO: 10518 - DNA, 20 bp, Artificial Sequence
  Target HLA Sequence complement
ggtgcactgagctgtaactt

SEQ ID NO: 10519 - DNA, 20 bp, Artificial Sequence
  Target HLA Sequence complement
gtgcactgagctgtaacttc

SEQ ID NO: 10520 - DNA, 20 bp, Artificial Sequence
  Target HLA Sequence complement
tgcactgagctgtaacttct

SEQ ID NO: 10521 - DNA, 20 bp, Artificial Sequence
  Target HLA Sequence complement
gcactgagctgtaacttctt

SEQ ID NO: 10522 - DNA, 20 bp, Artificial Sequence
  Target HLA Sequence complement
cactgagctgtaacttcttc

SEQ ID NO: 10523 - DNA, 20 bp, Artificial Sequence
  Target HLA Sequence complement
actgagctgtaacttcttcc

SEQ ID NO: 10524 - DNA, 20 bp, Artificial Sequence
  Target HLA Sequence complement
ctgagctgtaacttcttcct

SEQ ID NO: 10525 - DNA, 20 bp, Artificial Sequence
  Target HLA Sequence complement
tgagctgtaacttcttcctt

SEQ ID NO: 10526 - DNA, 20 bp, Artificial Sequence
  Target HLA Sequence complement
gagctgtaacttcttccttc

SEQ ID NO: 10527 - DNA, 20 bp, Artificial Sequence
  Target HLA Sequence complement
agctgtaacttcttccttcc

SEQ ID NO: 10528 - DNA, 20 bp, Artificial Sequence
  Target HLA Sequence complement
gctgtaacttcttccttccc

SEQ ID NO: 10529 - DNA, 20 bp, Artificial Sequence
  Target HLA Sequence complement
ctgtaacttcttccttccct

SEQ ID NO: 10530 - DNA, 20 bp, Artificial Sequence
  Target HLA Sequence complement
tgtaacttcttccttcccta

SEQ ID NO: 10531 - DNA, 20 bp, Artificial Sequence
  Target HLA Sequence complement
gtaacttcttccttccctat

SEQ ID NO: 10532 - DNA, 20 bp, Artificial Sequence
  Target HLA Sequence complement
taacttcttccttccctatt

SEQ ID NO: 10533 - DNA, 20 bp, Artificial Sequence
  Target HLA Sequence complement
aacttcttccttccctatta

SEQ ID NO: 10534 - DNA, 20 bp, Artificial Sequence
  Target HLA Sequence complement
acttcttccttccctattaa

SEQ ID NO: 10535 - DNA, 20 bp, Artificial Sequence
  Target HLA Sequence complement
cttcttccttccctattaaa

SEQ ID NO: 10536 - DNA, 21 bp, Artificial Sequence
  Target HLA Sequence complement
cccgaaggcggtgtatggatt

SEQ ID NO: 10537 - DNA, 21 bp, Artificial Sequence
  Target HLA Sequence complement
ccgaaggcggtgtatggattg

SEQ ID NO: 10538 - DNA, 21 bp, Artificial Sequence
  Target HLA Sequence complement
cgaaggcggtgtatggattgg

SEQ ID NO: 10539 - DNA, 21 bp, Artificial Sequence
  Target HLA Sequence complement
gaaggcggtgtatggattggg

SEQ ID NO: 10540 - DNA, 21 bp, Artificial Sequence
  Target HLA Sequence complement
ccctctcccaacctatgtagg

SEQ ID NO: 10541 - DNA, 21 bp, Artificial Sequence
  Target HLA Sequence complement
cctctcccaacctatgtaggg

SEQ ID NO: 10542 - DNA, 21 bp, Artificial Sequence
  Target HLA Sequence complement
ctctcccaacctatgtagggt

SEQ ID NO: 10543 - DNA, 21 bp, Artificial Sequence
  Target HLA Sequence complement
tctcccaacctatgtagggtc

SEQ ID NO: 10544 - DNA, 21 bp, Artificial Sequence
  Target HLA Sequence complement
ctcccaacctatgtagggtcc

SEQ ID NO: 10545 - DNA, 21 bp, Artificial Sequence
  Target HLA Sequence complement
tcccaacctatgtagggtcct

SEQ ID NO: 10546 - DNA, 21 bp, Artificial Sequence
  Target HLA Sequence complement
aacctatgtagggtccttctt

SEQ ID NO: 10547 - DNA, 21 bp, Artificial Sequence
  Target HLA Sequence complement
atgtagggtccttcttcctgg

SEQ ID NO: 10548 - DNA, 21 bp, Artificial Sequence
  Target HLA Sequence complement
tgtagggtccttcttcctgga

SEQ ID NO: 10549 - DNA, 21 bp, Artificial Sequence
  Target HLA Sequence complement
ccttcttcctggatactcacg

SEQ ID NO: 10550 - DNA, 21 bp, Artificial Sequence
  Target HLA Sequence complement
ttcttcctggatactcacgac

SEQ ID NO: 10551 - DNA, 21 bp, Artificial Sequence
  Target HLA Sequence complement
tcttcctggatactcacgacg

SEQ ID NO: 10552 - DNA, 21 bp, Artificial Sequence
  Target HLA Sequence complement
cttcctggatactcacgacgc

SEQ ID NO: 10553 - DNA, 21 bp, Artificial Sequence
  Target HLA Sequence complement
ttcctggatactcacgacgcg

SEQ ID NO: 10554 - DNA, 21 bp, Artificial Sequence
  Target HLA Sequence complement
ggacccagttctcactcccat

SEQ ID NO: 10555 - DNA, 21 bp, Artificial Sequence
  Target HLA Sequence complement
cccagttctcactcccattgg

SEQ ID NO: 10556 - DNA, 21 bp, Artificial Sequence
  Target HLA Sequence complement
ccagttctcactcccattggg

SEQ ID NO: 10557 - DNA, 21 bp, Artificial Sequence
  Target HLA Sequence complement
cagttctcactcccattgggt

SEQ ID NO: 10558 - DNA, 21 bp, Artificial Sequence
  Target HLA Sequence complement
agttctcactcccattgggtg

SEQ ID NO: 10559 - DNA, 21 bp, Artificial Sequence
  Target HLA Sequence complement
gttctcactcccattgggtgt

SEQ ID NO: 10560 - DNA, 21 bp, Artificial Sequence
  Target HLA Sequence complement
tctcactcccattgggtgtcg

SEQ ID NO: 10561 - DNA, 21 bp, Artificial Sequence
  Target HLA Sequence complement
actcccattgggtgtcgggtt

SEQ ID NO: 10562 - DNA, 21 bp, Artificial Sequence
  Target HLA Sequence complement
ctcccattgggtgtcgggttt

SEQ ID NO: 10563 - DNA, 21 bp, Artificial Sequence
  Target HLA Sequence complement
tcccattgggtgtcgggtttc

SEQ ID NO: 10564 - DNA, 21 bp, Artificial Sequence
  Target HLA Sequence complement
ccattgggtgtcgggtttcca

SEQ ID NO: 10565 - DNA, 21 bp, Artificial Sequence
  Target HLA Sequence complement
cattgggtgtcgggtttccag

SEQ ID NO: 10566 - DNA, 21 bp, Artificial Sequence
  Target HLA Sequence complement
ttgggtgtcgggtttccagag

SEQ ID NO: 10567 - DNA, 21 bp, Artificial Sequence
  Target HLA Sequence complement
tgggtgtcgggtttccagaga

SEQ ID NO: 10568 - DNA, 21 bp, Artificial Sequence
  Target HLA Sequence complement
gggtgtcgggtttccagagaa

SEQ ID NO: 10569 - DNA, 21 bp, Artificial Sequence
  Target HLA Sequence complement
ggtgtcgggtttccagagaag

SEQ ID NO: 10570 - DNA, 21 bp, Artificial Sequence
  Target HLA Sequence complement
gtgtcgggtttccagagaagc

SEQ ID NO: 10571 - DNA, 21 bp, Artificial Sequence
  Target HLA Sequence complement
tgtcgggtttccagagaagcc

SEQ ID NO: 10572 - DNA, 21 bp, Artificial Sequence
  Target HLA Sequence complement
gtcgggtttccagagaagcca

SEQ ID NO: 10573 - DNA, 21 bp, Artificial Sequence
  Target HLA Sequence complement
cagagaagccaatcagtgtcg

SEQ ID NO: 10574 - DNA, 21 bp, Artificial Sequence
  Target HLA Sequence complement
gagaagccaatcagtgtcgtc

SEQ ID NO: 10575 - DNA, 21 bp, Artificial Sequence
  Target HLA Sequence complement
agaagccaatcagtgtcgtcg

SEQ ID NO: 10576 - DNA, 21 bp, Artificial Sequence
  Target HLA Sequence complement
gaagccaatcagtgtcgtcgc

SEQ ID NO: 10577 - DNA, 21 bp, Artificial Sequence
  Target HLA Sequence complement
tcgcggtcgcggttctaaagt

SEQ ID NO: 10578 - DNA, 21 bp, Artificial Sequence
  Target HLA Sequence complement
gtcgcggttctaaagtccgca

SEQ ID NO: 10579 - DNA, 21 bp, Artificial Sequence
  Target HLA Sequence complement
tcgcggttctaaagtccgcac

SEQ ID NO: 10580 - DNA, 21 bp, Artificial Sequence
  Target HLA Sequence complement
cggttctaaagtccgcacgca

SEQ ID NO: 10581 - DNA, 21 bp, Artificial Sequence
  Target HLA Sequence complement
ggttctaaagtccgcacgcac

SEQ ID NO: 10582 - DNA, 21 bp, Artificial Sequence
  Target HLA Sequence complement
gttctaaagtccgcacgcacc

SEQ ID NO: 10583 - DNA, 21 bp, Artificial Sequence
  Target HLA Sequence complement
ttctaaagtccgcacgcaccc

SEQ ID NO: 10584 - DNA, 21 bp, Artificial Sequence
  Target HLA Sequence complement
tctaaagtccgcacgcaccca

SEQ ID NO: 10585 - DNA, 21 bp, Artificial Sequence
  Target HLA Sequence complement
acccaccgggactcagattct

SEQ ID NO: 10586 - DNA, 21 bp, Artificial Sequence
  Target HLA Sequence complement
gaaccctcgtcctgctactct

SEQ ID NO: 10587 - DNA, 21 bp, Artificial Sequence
  Target HLA Sequence complement
aaccctcgtcctgctactctc

SEQ ID NO: 10588 - DNA, 21 bp, Artificial Sequence
  Target HLA Sequence complement
gggctctcactccatgaggta

SEQ ID NO: 10589 - DNA, 21 bp, Artificial Sequence
  Target HLA Sequence complement
tgaggtatttcttcacatccg

SEQ ID NO: 10590 - DNA, 21 bp, Artificial Sequence
  Target HLA Sequence complement
gaggtatttcttcacatccgt

SEQ ID NO: 10591 - DNA, 21 bp, Artificial Sequence
  Target HLA Sequence complement
aggtatttcttcacatccgtg

SEQ ID NO: 10592 - DNA, 21 bp, Artificial Sequence
  Target HLA Sequence complement
ggtatttcttcacatccgtgt

SEQ ID NO: 10593 - DNA, 21 bp, Artificial Sequence
  Target HLA Sequence complement
tatttcttcacatccgtgtcc

SEQ ID NO: 10594 - DNA, 21 bp, Artificial Sequence
  Target HLA Sequence complement
atttcttcacatccgtgtccc

SEQ ID NO: 10595 - DNA, 21 bp, Artificial Sequence
  Target HLA Sequence complement
tttcttcacatccgtgtcccg

SEQ ID NO: 10596 - DNA, 21 bp, Artificial Sequence
  Target HLA Sequence complement
ttcttcacatccgtgtcccgg

SEQ ID NO: 10597 - DNA, 21 bp, Artificial Sequence
  Target HLA Sequence complement
cttcatcgcagtgggctacgt

SEQ ID NO: 10598 - DNA, 21 bp, Artificial Sequence
  Target HLA Sequence complement
ttcatcgcagtgggctacgtg

SEQ ID NO: 10599 - DNA, 21 bp, Artificial Sequence
  Target HLA Sequence complement
ctacgtggacgacacgcagtt

SEQ ID NO: 10600 - DNA, 21 bp, Artificial Sequence
  Target HLA Sequence complement
tacgtggacgacacgcagttc

SEQ ID NO: 10601 - DNA, 21 bp, Artificial Sequence
  Target HLA Sequence complement
gggagacacggaaagtgaagg

SEQ ID NO: 10602 - DNA, 21 bp, Artificial Sequence
  Target HLA Sequence complement
ggagacacggaaagtgaaggc

SEQ ID NO: 10603 - DNA, 21 bp, Artificial Sequence
  Target HLA Sequence complement
gagacacggaaagtgaaggcc

SEQ ID NO: 10604 - DNA, 21 bp, Artificial Sequence
  Target HLA Sequence complement
agacacggaaagtgaaggccc

SEQ ID NO: 10605 - DNA, 21 bp, Artificial Sequence
  Target HLA Sequence complement
gacacggaaagtgaaggccca

SEQ ID NO: 10606 - DNA, 21 bp, Artificial Sequence
  Target HLA Sequence complement
acacggaaagtgaaggcccac

SEQ ID NO: 10607 - DNA, 21 bp, Artificial Sequence
  Target HLA Sequence complement
cacggaaagtgaaggcccact

SEQ ID NO: 10608 - DNA, 21 bp, Artificial Sequence
  Target HLA Sequence complement
acggaaagtgaaggcccactc

SEQ ID NO: 10609 - DNA, 21 bp, Artificial Sequence
  Target HLA Sequence complement
cggaaagtgaaggcccactca

SEQ ID NO: 10610 - DNA, 21 bp, Artificial Sequence
  Target HLA Sequence complement
ggaaagtgaaggcccactcac

SEQ ID NO: 10611 - DNA, 21 bp, Artificial Sequence
  Target HLA Sequence complement
aaagtgaaggcccactcacag

SEQ ID NO: 10612 - DNA, 21 bp, Artificial Sequence
  Target HLA Sequence complement
aagtgaaggcccactcacaga

SEQ ID NO: 10613 - DNA, 21 bp, Artificial Sequence
  Target HLA Sequence complement
agtgaaggcccactcacagac

SEQ ID NO: 10614 - DNA, 21 bp, Artificial Sequence
  Target HLA Sequence complement
gtgaaggcccactcacagact

SEQ ID NO: 10615 - DNA, 21 bp, Artificial Sequence
  Target HLA Sequence complement
tgaaggcccactcacagactc

SEQ ID NO: 10616 - DNA, 21 bp, Artificial Sequence
  Target HLA Sequence complement
gaaggcccactcacagactca

SEQ ID NO: 10617 - DNA, 21 bp, Artificial Sequence
  Target HLA Sequence complement
aaggcccactcacagactcac

SEQ ID NO: 10618 - DNA, 21 bp, Artificial Sequence
  Target HLA Sequence complement
ccactcacagactcaccgagt

SEQ ID NO: 10619 - DNA, 21 bp, Artificial Sequence
  Target HLA Sequence complement
cactcacagactcaccgagtg

SEQ ID NO: 10620 - DNA, 21 bp, Artificial Sequence
  Target HLA Sequence complement
actcacagactcaccgagtgg

SEQ ID NO: 10621 - DNA, 21 bp, Artificial Sequence
  Target HLA Sequence complement
ctcacagactcaccgagtgga

SEQ ID NO: 10622 - DNA, 21 bp, Artificial Sequence
  Target HLA Sequence complement
tcacagactcaccgagtggac

SEQ ID NO: 10623 - DNA, 21 bp, Artificial Sequence
  Target HLA Sequence complement
acagactcaccgagtggacct

SEQ ID NO: 10624 - DNA, 21 bp, Artificial Sequence
  Target HLA Sequence complement
cggctactacaaccagagcga

SEQ ID NO: 10625 - DNA, 21 bp, Artificial Sequence
  Target HLA Sequence complement
ggctactacaaccagagcgag

SEQ ID NO: 10626 - DNA, 21 bp, Artificial Sequence
  Target HLA Sequence complement
gctactacaaccagagcgagg

SEQ ID NO: 10627 - DNA, 21 bp, Artificial Sequence
  Target HLA Sequence complement
ctactacaaccagagcgaggc

SEQ ID NO: 10628 - DNA, 21 bp, Artificial Sequence
  Target HLA Sequence complement
tactacaaccagagcgaggcc

SEQ ID NO: 10629 - DNA, 21 bp, Artificial Sequence
  Target HLA Sequence complement
gttctcacaccgtccagagga

SEQ ID NO: 10630 - DNA, 21 bp, Artificial Sequence
  Target HLA Sequence complement
tctcacaccgtccagaggatg

SEQ ID NO: 10631 - DNA, 21 bp, Artificial Sequence
  Target HLA Sequence complement
ctcacaccgtccagaggatgt

SEQ ID NO: 10632 - DNA, 21 bp, Artificial Sequence
  Target HLA Sequence complement
caccgtccagaggatgtatgg

SEQ ID NO: 10633 - DNA, 21 bp, Artificial Sequence
  Target HLA Sequence complement
accgtccagaggatgtatggc

SEQ ID NO: 10634 - DNA, 21 bp, Artificial Sequence
  Target HLA Sequence complement
ccgtccagaggatgtatggct

SEQ ID NO: 10635 - DNA, 21 bp, Artificial Sequence
  Target HLA Sequence complement
cgtccagaggatgtatggctg

SEQ ID NO: 10636 - DNA, 21 bp, Artificial Sequence
  Target HLA Sequence complement
gtccagaggatgtatggctgc

SEQ ID NO: 10637 - DNA, 21 bp, Artificial Sequence
  Target HLA Sequence complement
tccagaggatgtatggctgcg

SEQ ID NO: 10638 - DNA, 21 bp, Artificial Sequence
  Target HLA Sequence complement
ccagaggatgtatggctgcga

SEQ ID NO: 10639 - DNA, 21 bp, Artificial Sequence
  Target HLA Sequence complement
cagaggatgtatggctgcgac

SEQ ID NO: 10640 - DNA, 21 bp, Artificial Sequence
  Target HLA Sequence complement
agaggatgtatggctgcgacg

SEQ ID NO: 10641 - DNA, 21 bp, Artificial Sequence
  Target HLA Sequence complement
gaggatgtatggctgcgacgt

SEQ ID NO: 10642 - DNA, 21 bp, Artificial Sequence
  Target HLA Sequence complement
aggatgtatggctgcgacgtg

SEQ ID NO: 10643 - DNA, 21 bp, Artificial Sequence
  Target HLA Sequence complement
gtaccaccagtacgcctacga

SEQ ID NO: 10644 - DNA, 21 bp, Artificial Sequence
  Target HLA Sequence complement
taccaccagtacgcctacgac

SEQ ID NO: 10645 - DNA, 21 bp, Artificial Sequence
  Target HLA Sequence complement
tacgcctacgacggcaaggat

SEQ ID NO: 10646 - DNA, 21 bp, Artificial Sequence
  Target HLA Sequence complement
acgcctacgacggcaaggatt

SEQ ID NO: 10647 - DNA, 21 bp, Artificial Sequence
  Target HLA Sequence complement
cgacggcaaggattacatcgc

SEQ ID NO: 10648 - DNA, 21 bp, Artificial Sequence
  Target HLA Sequence complement
gacggcaaggattacatcgcc

SEQ ID NO: 10649 - DNA, 21 bp, Artificial Sequence
  Target HLA Sequence complement
acggcaaggattacatcgccc

SEQ ID NO: 10650 - DNA, 21 bp, Artificial Sequence
  Target HLA Sequence complement
cggcaaggattacatcgccct

SEQ ID NO: 10651 - DNA, 21 bp, Artificial Sequence
  Target HLA Sequence complement
ggcaaggattacatcgccctg

SEQ ID NO: 10652 - DNA, 21 bp, Artificial Sequence
  Target HLA Sequence complement
gcaaggattacatcgccctga

SEQ ID NO: 10653 - DNA, 21 bp, Artificial Sequence
  Target HLA Sequence complement
aaggattacatcgccctgaaa

SEQ ID NO: 10654 - DNA, 21 bp, Artificial Sequence
  Target HLA Sequence complement
tacatcgccctgaaagaggac

SEQ ID NO: 10655 - DNA, 21 bp, Artificial Sequence
  Target HLA Sequence complement
acatcgccctgaaagaggacc

SEQ ID NO: 10656 - DNA, 21 bp, Artificial Sequence
  Target HLA Sequence complement
catcgccctgaaagaggacct

SEQ ID NO: 10657 - DNA, 21 bp, Artificial Sequence
  Target HLA Sequence complement
atcgccctgaaagaggacctg

SEQ ID NO: 10658 - DNA, 21 bp, Artificial Sequence
  Target HLA Sequence complement
ctgaaagaggacctgcgctct

SEQ ID NO: 10659 - DNA, 21 bp, Artificial Sequence
  Target HLA Sequence complement
tgaaagaggacctgcgctctt

SEQ ID NO: 10660 - DNA, 21 bp, Artificial Sequence
  Target HLA Sequence complement
gaaagaggacctgcgctcttg

SEQ ID NO: 10661 - DNA, 21 bp, Artificial Sequence
  Target HLA Sequence complement
acatggcagctcagaccacca

SEQ ID NO: 10662 - DNA, 21 bp, Artificial Sequence
  Target HLA Sequence complement
catggcagctcagaccaccaa

SEQ ID NO: 10663 - DNA, 21 bp, Artificial Sequence
  Target HLA Sequence complement
atggcagctcagaccaccaag

SEQ ID NO: 10664 - DNA, 21 bp, Artificial Sequence
  Target HLA Sequence complement
cagctcagaccaccaagcaca

SEQ ID NO: 10665 - DNA, 21 bp, Artificial Sequence
  Target HLA Sequence complement
gctcagaccaccaagcacaag

SEQ ID NO: 10666 - DNA, 21 bp, Artificial Sequence
  Target HLA Sequence complement
cagaccaccaagcacaagtgg

SEQ ID NO: 10667 - DNA, 21 bp, Artificial Sequence
  Target HLA Sequence complement
agaccaccaagcacaagtggg

SEQ ID NO: 10668 - DNA, 21 bp, Artificial Sequence
  Target HLA Sequence complement
gaccaccaagcacaagtggga

SEQ ID NO: 10669 - DNA, 21 bp, Artificial Sequence
  Target HLA Sequence complement
accaccaagcacaagtgggag

SEQ ID NO: 10670 - DNA, 21 bp, Artificial Sequence
  Target HLA Sequence complement
catgtggcggagcagttgaga

SEQ ID NO: 10671 - DNA, 21 bp, Artificial Sequence
  Target HLA Sequence complement
atgtggcggagcagttgagag

SEQ ID NO: 10672 - DNA, 21 bp, Artificial Sequence
  Target HLA Sequence complement
ggagcagttgagagcctacct

SEQ ID NO: 10673 - DNA, 21 bp, Artificial Sequence
  Target HLA Sequence complement
gagcagttgagagcctacctg

SEQ ID NO: 10674 - DNA, 21 bp, Artificial Sequence
  Target HLA Sequence complement
agcagttgagagcctacctgg

SEQ ID NO: 10675 - DNA, 21 bp, Artificial Sequence
  Target HLA Sequence complement
gcagttgagagcctacctgga

SEQ ID NO: 10676 - DNA, 21 bp, Artificial Sequence
  Target HLA Sequence complement
cagttgagagcctacctggag

SEQ ID NO: 10677 - DNA, 21 bp, Artificial Sequence
  Target HLA Sequence complement
agttgagagcctacctggagg

SEQ ID NO: 10678 - DNA, 21 bp, Artificial Sequence
  Target HLA Sequence complement
gctccgcagatacctggagaa

SEQ ID NO: 10679 - DNA, 21 bp, Artificial Sequence
  Target HLA Sequence complement
ctccgcagatacctggagaac

SEQ ID NO: 10680 - DNA, 21 bp, Artificial Sequence
  Target HLA Sequence complement
tccgcagatacctggagaacg

SEQ ID NO: 10681 - DNA, 21 bp, Artificial Sequence
  Target HLA Sequence complement
gcagatacctggagaacggga

SEQ ID NO: 10682 - DNA, 21 bp, Artificial Sequence
  Target HLA Sequence complement
cagatacctggagaacgggaa

SEQ ID NO: 10683 - DNA, 21 bp, Artificial Sequence
  Target HLA Sequence complement
gatacctggagaacgggaagg

SEQ ID NO: 10684 - DNA, 21 bp, Artificial Sequence
  Target HLA Sequence complement
tacctggagaacgggaaggag

SEQ ID NO: 10685 - DNA, 21 bp, Artificial Sequence
  Target HLA Sequence complement
acctggagaacgggaaggaga

SEQ ID NO: 10686 - DNA, 21 bp, Artificial Sequence
  Target HLA Sequence complement
aacgcatatgactcaccacgc

SEQ ID NO: 10687 - DNA, 21 bp, Artificial Sequence
  Target HLA Sequence complement
acgcatatgactcaccacgct

SEQ ID NO: 10688 - DNA, 21 bp, Artificial Sequence
  Target HLA Sequence complement
cgcatatgactcaccacgctg

SEQ ID NO: 10689 - DNA, 21 bp, Artificial Sequence
  Target HLA Sequence complement
gcatatgactcaccacgctgt

SEQ ID NO: 10690 - DNA, 21 bp, Artificial Sequence
  Target HLA Sequence complement
catatgactcaccacgctgtc

SEQ ID NO: 10691 - DNA, 21 bp, Artificial Sequence
  Target HLA Sequence complement
tgactcaccacgctgtctctg

SEQ ID NO: 10692 - DNA, 21 bp, Artificial Sequence
  Target HLA Sequence complement
gactcaccacgctgtctctga

SEQ ID NO: 10693 - DNA, 21 bp, Artificial Sequence
  Target HLA Sequence complement
actcaccacgctgtctctgac

SEQ ID NO: 10694 - DNA, 21 bp, Artificial Sequence
  Target HLA Sequence complement
tcaccacgctgtctctgacca

SEQ ID NO: 10695 - DNA, 21 bp, Artificial Sequence
  Target HLA Sequence complement
caccacgctgtctctgaccat

SEQ ID NO: 10696 - DNA, 21 bp, Artificial Sequence
  Target HLA Sequence complement
accacgctgtctctgaccatg

SEQ ID NO: 10697 - DNA, 21 bp, Artificial Sequence
  Target HLA Sequence complement
ccacgctgtctctgaccatga

SEQ ID NO: 10698 - DNA, 21 bp, Artificial Sequence
  Target HLA Sequence complement
cgctgtctctgaccatgaagc

SEQ ID NO: 10699 - DNA, 21 bp, Artificial Sequence
  Target HLA Sequence complement
gctgtctctgaccatgaagcc

SEQ ID NO: 10700 - DNA, 21 bp, Artificial Sequence
  Target HLA Sequence complement
ctgtctctgaccatgaagcca

SEQ ID NO: 10701 - DNA, 21 bp, Artificial Sequence
  Target HLA Sequence complement
tgtctctgaccatgaagccac

SEQ ID NO: 10702 - DNA, 21 bp, Artificial Sequence
  Target HLA Sequence complement
gtctctgaccatgaagccacc

SEQ ID NO: 10703 - DNA, 21 bp, Artificial Sequence
  Target HLA Sequence complement
tctctgaccatgaagccaccc

SEQ ID NO: 10704 - DNA, 21 bp, Artificial Sequence
  Target HLA Sequence complement
ctctgaccatgaagccaccct

SEQ ID NO: 10705 - DNA, 21 bp, Artificial Sequence
  Target HLA Sequence complement
tctgaccatgaagccaccctg

SEQ ID NO: 10706 - DNA, 21 bp, Artificial Sequence
  Target HLA Sequence complement
ctgaccatgaagccaccctga

SEQ ID NO: 10707 - DNA, 21 bp, Artificial Sequence
  Target HLA Sequence complement
tgaccatgaagccaccctgag

SEQ ID NO: 10708 - DNA, 21 bp, Artificial Sequence
  Target HLA Sequence complement
accatgaagccaccctgaggt

SEQ ID NO: 10709 - DNA, 21 bp, Artificial Sequence
  Target HLA Sequence complement
atgaagccaccctgaggtgct

SEQ ID NO: 10710 - DNA, 21 bp, Artificial Sequence
  Target HLA Sequence complement
tgagcttctaccctgcggaga

SEQ ID NO: 10711 - DNA, 21 bp, Artificial Sequence
  Target HLA Sequence complement
gagcttctaccctgcggagat

SEQ ID NO: 10712 - DNA, 21 bp, Artificial Sequence
  Target HLA Sequence complement
agcttctaccctgcggagatc

SEQ ID NO: 10713 - DNA, 21 bp, Artificial Sequence
  Target HLA Sequence complement
gcttctaccctgcggagatca

SEQ ID NO: 10714 - DNA, 21 bp, Artificial Sequence
  Target HLA Sequence complement
cttctaccctgcggagatcac

SEQ ID NO: 10715 - DNA, 21 bp, Artificial Sequence
  Target HLA Sequence complement
tctaccctgcggagatcacac

SEQ ID NO: 10716 - DNA, 21 bp, Artificial Sequence
  Target HLA Sequence complement
ctaccctgcggagatcacact

SEQ ID NO: 10717 - DNA, 21 bp, Artificial Sequence
  Target HLA Sequence complement
taccctgcggagatcacactg

SEQ ID NO: 10718 - DNA, 21 bp, Artificial Sequence
  Target HLA Sequence complement
accctgcggagatcacactga

SEQ ID NO: 10719 - DNA, 21 bp, Artificial Sequence
  Target HLA Sequence complement
ctgcggagatcacactgacct

SEQ ID NO: 10720 - DNA, 21 bp, Artificial Sequence
  Target HLA Sequence complement
tgcggagatcacactgacctg

SEQ ID NO: 10721 - DNA, 21 bp, Artificial Sequence
  Target HLA Sequence complement
gagatcacactgacctggcag

SEQ ID NO: 10722 - DNA, 21 bp, Artificial Sequence
  Target HLA Sequence complement
agatcacactgacctggcagc

SEQ ID NO: 10723 - DNA, 21 bp, Artificial Sequence
  Target HLA Sequence complement
atggaaccttccagaagtggg

SEQ ID NO: 10724 - DNA, 21 bp, Artificial Sequence
  Target HLA Sequence complement
tggaaccttccagaagtgggc

SEQ ID NO: 10725 - DNA, 21 bp, Artificial Sequence
  Target HLA Sequence complement
tgtggtggtgccttctggaca

SEQ ID NO: 10726 - DNA, 21 bp, Artificial Sequence
  Target HLA Sequence complement
tgccttctggacaggagcaga

SEQ ID NO: 10727 - DNA, 21 bp, Artificial Sequence
  Target HLA Sequence complement
ccttctggacaggagcagaga

SEQ ID NO: 10728 - DNA, 21 bp, Artificial Sequence
  Target HLA Sequence complement
ggacaggagcagagatacacc

SEQ ID NO: 10729 - DNA, 21 bp, Artificial Sequence
  Target HLA Sequence complement
acaggagcagagatacacctg

SEQ ID NO: 10730 - DNA, 21 bp, Artificial Sequence
  Target HLA Sequence complement
caggagcagagatacacctgc

SEQ ID NO: 10731 - DNA, 21 bp, Artificial Sequence
  Target HLA Sequence complement
aggagcagagatacacctgcc

SEQ ID NO: 10732 - DNA, 21 bp, Artificial Sequence
  Target HLA Sequence complement
ggagcagagatacacctgcca

SEQ ID NO: 10733 - DNA, 21 bp, Artificial Sequence
  Target HLA Sequence complement
agcagagatacacctgccatg

SEQ ID NO: 10734 - DNA, 21 bp, Artificial Sequence
  Target HLA Sequence complement
agatacacctgccatgtgcag

SEQ ID NO: 10735 - DNA, 21 bp, Artificial Sequence
  Target HLA Sequence complement
gatacacctgccatgtgcagc

SEQ ID NO: 10736 - DNA, 21 bp, Artificial Sequence
  Target HLA Sequence complement
atacacctgccatgtgcagca

SEQ ID NO: 10737 - DNA, 21 bp, Artificial Sequence
  Target HLA Sequence complement
acacctgccatgtgcagcatg

SEQ ID NO: 10738 - DNA, 21 bp, Artificial Sequence
  Target HLA Sequence complement
acctgccatgtgcagcatgag

SEQ ID NO: 10739 - DNA, 21 bp, Artificial Sequence
  Target HLA Sequence complement
tgccatgtgcagcatgagggt

SEQ ID NO: 10740 - DNA, 21 bp, Artificial Sequence
  Target HLA Sequence complement
gccatgtgcagcatgagggtt

SEQ ID NO: 10741 - DNA, 21 bp, Artificial Sequence
  Target HLA Sequence complement
tgtgcagcatgagggtttgcc

SEQ ID NO: 10742 - DNA, 21 bp, Artificial Sequence
  Target HLA Sequence complement
tgcagcatgagggtttgccca

SEQ ID NO: 10743 - DNA, 21 bp, Artificial Sequence
  Target HLA Sequence complement
gcagcatgagggtttgcccaa

SEQ ID NO: 10744 - DNA, 21 bp, Artificial Sequence
  Target HLA Sequence complement
cagcatgagggtttgcccaag

SEQ ID NO: 10745 - DNA, 21 bp, Artificial Sequence
  Target HLA Sequence complement
agcatgagggtttgcccaagc

SEQ ID NO: 10746 - DNA, 21 bp, Artificial Sequence
  Target HLA Sequence complement
cccatcgtgggcatcattgct

SEQ ID NO: 10747 - DNA, 21 bp, Artificial Sequence
  Target HLA Sequence complement
ccatcgtgggcatcattgctg

SEQ ID NO: 10748 - DNA, 21 bp, Artificial Sequence
  Target HLA Sequence complement
catcgtgggcatcattgctgg

SEQ ID NO: 10749 - DNA, 21 bp, Artificial Sequence
  Target HLA Sequence complement
atcgtgggcatcattgctggc

SEQ ID NO: 10750 - DNA, 21 bp, Artificial Sequence
  Target HLA Sequence complement
ggcatcattgctggcctggtt

SEQ ID NO: 10751 - DNA, 21 bp, Artificial Sequence
  Target HLA Sequence complement
gcatcattgctggcctggttc

SEQ ID NO: 10752 - DNA, 21 bp, Artificial Sequence
  Target HLA Sequence complement
tgctggcctggttctctttgg

SEQ ID NO: 10753 - DNA, 21 bp, Artificial Sequence
  Target HLA Sequence complement
gctggcctggttctctttgga

SEQ ID NO: 10754 - DNA, 21 bp, Artificial Sequence
  Target HLA Sequence complement
ctggcctggttctctttggag

SEQ ID NO: 10755 - DNA, 21 bp, Artificial Sequence
  Target HLA Sequence complement
tggcctggttctctttggagc

SEQ ID NO: 10756 - DNA, 21 bp, Artificial Sequence
  Target HLA Sequence complement
ggcctggttctctttggagct

SEQ ID NO: 10757 - DNA, 21 bp, Artificial Sequence
  Target HLA Sequence complement
gcctggttctctttggagctg

SEQ ID NO: 10758 - DNA, 21 bp, Artificial Sequence
  Target HLA Sequence complement
ctggttctctttggagctgtg

SEQ ID NO: 10759 - DNA, 21 bp, Artificial Sequence
  Target HLA Sequence complement
ctttggagctgtgatcactgg

SEQ ID NO: 10760 - DNA, 21 bp, Artificial Sequence
  Target HLA Sequence complement
ttggagctgtgatcactggag

SEQ ID NO: 10761 - DNA, 21 bp, Artificial Sequence
  Target HLA Sequence complement
tggagctgtgatcactggagc

SEQ ID NO: 10762 - DNA, 21 bp, Artificial Sequence
  Target HLA Sequence complement
ggagctgtgatcactggagct

SEQ ID NO: 10763 - DNA, 21 bp, Artificial Sequence
  Target HLA Sequence complement
gagctgtgatcactggagctg

SEQ ID NO: 10764 - DNA, 21 bp, Artificial Sequence
  Target HLA Sequence complement
gctgtgatcactggagctgtg

SEQ ID NO: 10765 - DNA, 21 bp, Artificial Sequence
  Target HLA Sequence complement
ctgtgatcactggagctgtgg

SEQ ID NO: 10766 - DNA, 21 bp, Artificial Sequence
  Target HLA Sequence complement
gtgatcactggagctgtggtc

SEQ ID NO: 10767 - DNA, 21 bp, Artificial Sequence
  Target HLA Sequence complement
tgatcactggagctgtggtcg

SEQ ID NO: 10768 - DNA, 21 bp, Artificial Sequence
  Target HLA Sequence complement
atcactggagctgtggtcgct

SEQ ID NO: 10769 - DNA, 21 bp, Artificial Sequence
  Target HLA Sequence complement
agctgtggtcgctgctgtgat

SEQ ID NO: 10770 - DNA, 21 bp, Artificial Sequence
  Target HLA Sequence complement
ctgtggtcgctgctgtgatgt

SEQ ID NO: 10771 - DNA, 21 bp, Artificial Sequence
  Target HLA Sequence complement
tgtggtcgctgctgtgatgtg

SEQ ID NO: 10772 - DNA, 21 bp, Artificial Sequence
  Target HLA Sequence complement
tggtcgctgctgtgatgtgga

SEQ ID NO: 10773 - DNA, 21 bp, Artificial Sequence
  Target HLA Sequence complement
tcgctgctgtgatgtggagga

SEQ ID NO: 10774 - DNA, 21 bp, Artificial Sequence
  Target HLA Sequence complement
ctgctgtgatgtggaggagga

SEQ ID NO: 10775 - DNA, 21 bp, Artificial Sequence
  Target HLA Sequence complement
gctgtgatgtggaggaggaag

SEQ ID NO: 10776 - DNA, 21 bp, Artificial Sequence
  Target HLA Sequence complement
gtgatgtggaggaggaagagc

SEQ ID NO: 10777 - DNA, 21 bp, Artificial Sequence
  Target HLA Sequence complement
gatgtggaggaggaagagctc

SEQ ID NO: 10778 - DNA, 21 bp, Artificial Sequence
  Target HLA Sequence complement
tgtggaggaggaagagctcag

SEQ ID NO: 10779 - DNA, 21 bp, Artificial Sequence
  Target HLA Sequence complement
gtggaggaggaagagctcaga

SEQ ID NO: 10780 - DNA, 21 bp, Artificial Sequence
  Target HLA Sequence complement
aaaggagggagctactctcag

SEQ ID NO: 10781 - DNA, 21 bp, Artificial Sequence
  Target HLA Sequence complement
aaggagggagctactctcagg

SEQ ID NO: 10782 - DNA, 21 bp, Artificial Sequence
  Target HLA Sequence complement
ggagctactctcaggctgcaa

SEQ ID NO: 10783 - DNA, 21 bp, Artificial Sequence
  Target HLA Sequence complement
gagctactctcaggctgcaag

SEQ ID NO: 10784 - DNA, 21 bp, Artificial Sequence
  Target HLA Sequence complement
agctactctcaggctgcaagc

SEQ ID NO: 10785 - DNA, 21 bp, Artificial Sequence
  Target HLA Sequence complement
gctactctcaggctgcaagca

SEQ ID NO: 10786 - DNA, 21 bp, Artificial Sequence
  Target HLA Sequence complement
ctactctcaggctgcaagcag

SEQ ID NO: 10787 - DNA, 21 bp, Artificial Sequence
  Target HLA Sequence complement
actctcaggctgcaagcagtg

SEQ ID NO: 10788 - DNA, 21 bp, Artificial Sequence
  Target HLA Sequence complement
ctctcaggctgcaagcagtga

SEQ ID NO: 10789 - DNA, 21 bp, Artificial Sequence
  Target HLA Sequence complement
tctcaggctgcaagcagtgac

SEQ ID NO: 10790 - DNA, 21 bp, Artificial Sequence
  Target HLA Sequence complement
ctcaggctgcaagcagtgaca

SEQ ID NO: 10791 - DNA, 21 bp, Artificial Sequence
  Target HLA Sequence complement
tcaggctgcaagcagtgacag

SEQ ID NO: 10792 - DNA, 21 bp, Artificial Sequence
  Target HLA Sequence complement
caggctgcaagcagtgacagt

SEQ ID NO: 10793 - DNA, 21 bp, Artificial Sequence
  Target HLA Sequence complement
aggctgcaagcagtgacagtg

SEQ ID NO: 10794 - DNA, 21 bp, Artificial Sequence
  Target HLA Sequence complement
tgcaagcagtgacagtgccca

SEQ ID NO: 10795 - DNA, 21 bp, Artificial Sequence
  Target HLA Sequence complement
ccagggctctgatgtgtctct

SEQ ID NO: 10796 - DNA, 21 bp, Artificial Sequence
  Target HLA Sequence complement
cagggctctgatgtgtctctc

SEQ ID NO: 10797 - DNA, 21 bp, Artificial Sequence
  Target HLA Sequence complement
gggctctgatgtgtctctcac

SEQ ID NO: 10798 - DNA, 21 bp, Artificial Sequence
  Target HLA Sequence complement
ctctgatgtgtctctcacagc

SEQ ID NO: 10799 - DNA, 21 bp, Artificial Sequence
  Target HLA Sequence complement
ctcacagcttgtaaagtgtga

SEQ ID NO: 10800 - DNA, 21 bp, Artificial Sequence
  Target HLA Sequence complement
tcacagcttgtaaagtgtgag

SEQ ID NO: 10801 - DNA, 21 bp, Artificial Sequence
  Target HLA Sequence complement
gcttgtaaagtgtgagacagc

SEQ ID NO: 10802 - DNA, 21 bp, Artificial Sequence
  Target HLA Sequence complement
ttgtaaagtgtgagacagctg

SEQ ID NO: 10803 - DNA, 21 bp, Artificial Sequence
  Target HLA Sequence complement
tgtaaagtgtgagacagctgc

SEQ ID NO: 10804 - DNA, 21 bp, Artificial Sequence
  Target HLA Sequence complement
gtaaagtgtgagacagctgcc

SEQ ID NO: 10805 - DNA, 21 bp, Artificial Sequence
  Target HLA Sequence complement
taaagtgtgagacagctgcct

SEQ ID NO: 10806 - DNA, 21 bp, Artificial Sequence
  Target HLA Sequence complement
aaagtgtgagacagctgcctt

SEQ ID NO: 10807 - DNA, 21 bp, Artificial Sequence
  Target HLA Sequence complement
gtgtgagacagctgccttgtg

SEQ ID NO: 10808 - DNA, 21 bp, Artificial Sequence
  Target HLA Sequence complement
gtgagacagctgccttgtgtg

SEQ ID NO: 10809 - DNA, 21 bp, Artificial Sequence
  Target HLA Sequence complement
tgagacagctgccttgtgtgg

SEQ ID NO: 10810 - DNA, 21 bp, Artificial Sequence
  Target HLA Sequence complement
agacagctgccttgtgtggga

SEQ ID NO: 10811 - DNA, 21 bp, Artificial Sequence
  Target HLA Sequence complement
acagctgccttgtgtgggact

SEQ ID NO: 10812 - DNA, 21 bp, Artificial Sequence
  Target HLA Sequence complement
agctgccttgtgtgggactga

SEQ ID NO: 10813 - DNA, 21 bp, Artificial Sequence
  Target HLA Sequence complement
ctgccttgtgtgggactgaga

SEQ ID NO: 10814 - DNA, 21 bp, Artificial Sequence
  Target HLA Sequence complement
tgccttgtgtgggactgagag

SEQ ID NO: 10815 - DNA, 21 bp, Artificial Sequence
  Target HLA Sequence complement
cttgtgtgggactgagaggca

SEQ ID NO: 10816 - DNA, 21 bp, Artificial Sequence
  Target HLA Sequence complement
tgtgtgggactgagaggcaag

SEQ ID NO: 10817 - DNA, 21 bp, Artificial Sequence
  Target HLA Sequence complement
gtgtgggactgagaggcaaga

SEQ ID NO: 10818 - DNA, 21 bp, Artificial Sequence
  Target HLA Sequence complement
tgtgggactgagaggcaagag

SEQ ID NO: 10819 - DNA, 21 bp, Artificial Sequence
  Target HLA Sequence complement
gtgggactgagaggcaagagt

SEQ ID NO: 10820 - DNA, 21 bp, Artificial Sequence
  Target HLA Sequence complement
gggactgagaggcaagagttg

SEQ ID NO: 10821 - DNA, 21 bp, Artificial Sequence
  Target HLA Sequence complement
agaggcaagagttgttcctgc

SEQ ID NO: 10822 - DNA, 21 bp, Artificial Sequence
  Target HLA Sequence complement
gaggcaagagttgttcctgcc

SEQ ID NO: 10823 - DNA, 21 bp, Artificial Sequence
  Target HLA Sequence complement
aggcaagagttgttcctgccc

SEQ ID NO: 10824 - DNA, 21 bp, Artificial Sequence
  Target HLA Sequence complement
ggcaagagttgttcctgccct

SEQ ID NO: 10825 - DNA, 21 bp, Artificial Sequence
  Target HLA Sequence complement
gcaagagttgttcctgccctt

SEQ ID NO: 10826 - DNA, 21 bp, Artificial Sequence
  Target HLA Sequence complement
caagagttgttcctgcccttc

SEQ ID NO: 10827 - DNA, 21 bp, Artificial Sequence
  Target HLA Sequence complement
aagagttgttcctgcccttcc

SEQ ID NO: 10828 - DNA, 21 bp, Artificial Sequence
  Target HLA Sequence complement
agagttgttcctgcccttccc

SEQ ID NO: 10829 - DNA, 21 bp, Artificial Sequence
  Target HLA Sequence complement
gagttgttcctgcccttccct

SEQ ID NO: 10830 - DNA, 21 bp, Artificial Sequence
  Target HLA Sequence complement
gttcctgcccttccctttgtg

SEQ ID NO: 10831 - DNA, 21 bp, Artificial Sequence
  Target HLA Sequence complement
tcctgcccttccctttgtgac

SEQ ID NO: 10832 - DNA, 21 bp, Artificial Sequence
  Target HLA Sequence complement
cctgcccttccctttgtgact

SEQ ID NO: 10833 - DNA, 21 bp, Artificial Sequence
  Target HLA Sequence complement
cctttgtgacttgaagaaccc

SEQ ID NO: 10834 - DNA, 21 bp, Artificial Sequence
  Target HLA Sequence complement
ctttgtgacttgaagaaccct

SEQ ID NO: 10835 - DNA, 21 bp, Artificial Sequence
  Target HLA Sequence complement
tttgtgacttgaagaaccctg

SEQ ID NO: 10836 - DNA, 21 bp, Artificial Sequence
  Target HLA Sequence complement
ttgtgacttgaagaaccctga

SEQ ID NO: 10837 - DNA, 21 bp, Artificial Sequence
  Target HLA Sequence complement
tgtgacttgaagaaccctgac

SEQ ID NO: 10838 - DNA, 21 bp, Artificial Sequence
  Target HLA Sequence complement
aagaaccctgactttgtttct

SEQ ID NO: 10839 - DNA, 21 bp, Artificial Sequence
  Target HLA Sequence complement
aaccctgactttgtttctgca

SEQ ID NO: 10840 - DNA, 21 bp, Artificial Sequence
  Target HLA Sequence complement
cctgactttgtttctgcaaag

SEQ ID NO: 10841 - DNA, 21 bp, Artificial Sequence
  Target HLA Sequence complement
ctgactttgtttctgcaaagg

SEQ ID NO: 10842 - DNA, 21 bp, Artificial Sequence
  Target HLA Sequence complement
tgactttgtttctgcaaaggc

SEQ ID NO: 10843 - DNA, 21 bp, Artificial Sequence
  Target HLA Sequence complement
gactttgtttctgcaaaggca

SEQ ID NO: 10844 - DNA, 21 bp, Artificial Sequence
  Target HLA Sequence complement
actttgtttctgcaaaggcac

SEQ ID NO: 10845 - DNA, 21 bp, Artificial Sequence
  Target HLA Sequence complement
ctttgtttctgcaaaggcacc

SEQ ID NO: 10846 - DNA, 21 bp, Artificial Sequence
  Target HLA Sequence complement
tttgtttctgcaaaggcacct

SEQ ID NO: 10847 - DNA, 21 bp, Artificial Sequence
  Target HLA Sequence complement
ttgtttctgcaaaggcacctg

SEQ ID NO: 10848 - DNA, 21 bp, Artificial Sequence
  Target HLA Sequence complement
tgtttctgcaaaggcacctgc

SEQ ID NO: 10849 - DNA, 21 bp, Artificial Sequence
  Target HLA Sequence complement
gtttctgcaaaggcacctgca

SEQ ID NO: 10850 - DNA, 21 bp, Artificial Sequence
  Target HLA Sequence complement
ctgcaaaggcacctgcatgtg

SEQ ID NO: 10851 - DNA, 21 bp, Artificial Sequence
  Target HLA Sequence complement
gcaaaggcacctgcatgtgtc

SEQ ID NO: 10852 - DNA, 21 bp, Artificial Sequence
  Target HLA Sequence complement
aggcacctgcatgtgtctgtg

SEQ ID NO: 10853 - DNA, 21 bp, Artificial Sequence
  Target HLA Sequence complement
ggcacctgcatgtgtctgtgt

SEQ ID NO: 10854 - DNA, 21 bp, Artificial Sequence
  Target HLA Sequence complement
tgtgtctgtgttcgtgtaggc

SEQ ID NO: 10855 - DNA, 21 bp, Artificial Sequence
  Target HLA Sequence complement
gtgtctgtgttcgtgtaggca

SEQ ID NO: 10856 - DNA, 21 bp, Artificial Sequence
  Target HLA Sequence complement
tcgtgtaggcataatgtgagg

SEQ ID NO: 10857 - DNA, 21 bp, Artificial Sequence
  Target HLA Sequence complement
gtgtaggcataatgtgaggag

SEQ ID NO: 10858 - DNA, 21 bp, Artificial Sequence
  Target HLA Sequence complement
tgtaggcataatgtgaggagg

SEQ ID NO: 10859 - DNA, 21 bp, Artificial Sequence
  Target HLA Sequence complement
gtaggcataatgtgaggaggt

SEQ ID NO: 10860 - DNA, 21 bp, Artificial Sequence
  Target HLA Sequence complement
taggcataatgtgaggaggtg

SEQ ID NO: 10861 - DNA, 21 bp, Artificial Sequence
  Target HLA Sequence complement
aggcataatgtgaggaggtgg

SEQ ID NO: 10862 - DNA, 21 bp, Artificial Sequence
  Target HLA Sequence complement
ggcataatgtgaggaggtggg

SEQ ID NO: 10863 - DNA, 21 bp, Artificial Sequence
  Target HLA Sequence complement
ccatgtccaccatgaccctct

SEQ ID NO: 10864 - DNA, 21 bp, Artificial Sequence
  Target HLA Sequence complement
tgtccaccatgaccctcttcc

SEQ ID NO: 10865 - DNA, 21 bp, Artificial Sequence
  Target HLA Sequence complement
tccaccatgaccctcttccca

SEQ ID NO: 10866 - DNA, 21 bp, Artificial Sequence
  Target HLA Sequence complement
atgaccctcttcccacgctga

SEQ ID NO: 10867 - DNA, 21 bp, Artificial Sequence
  Target HLA Sequence complement
atcatctttcctgttccagag

SEQ ID NO: 10868 - DNA, 21 bp, Artificial Sequence
  Target HLA Sequence complement
atctttcctgttccagagagg

SEQ ID NO: 10869 - DNA, 21 bp, Artificial Sequence
  Target HLA Sequence complement
ctttcctgttccagagaggtg

SEQ ID NO: 10870 - DNA, 21 bp, Artificial Sequence
  Target HLA Sequence complement
tttcctgttccagagaggtgg

SEQ ID NO: 10871 - DNA, 21 bp, Artificial Sequence
  Target HLA Sequence complement
ttcctgttccagagaggtggg

SEQ ID NO: 10872 - DNA, 21 bp, Artificial Sequence
  Target HLA Sequence complement
ggctgaggtgtctccatctct

SEQ ID NO: 10873 - DNA, 21 bp, Artificial Sequence
  Target HLA Sequence complement
gctgaggtgtctccatctctg

SEQ ID NO: 10874 - DNA, 21 bp, Artificial Sequence
  Target HLA Sequence complement
tctgtctcaacttcatggtgc

SEQ ID NO: 10875 - DNA, 21 bp, Artificial Sequence
  Target HLA Sequence complement
ctgtctcaacttcatggtgca

SEQ ID NO: 10876 - DNA, 21 bp, Artificial Sequence
  Target HLA Sequence complement
tgtctcaacttcatggtgcac

SEQ ID NO: 10877 - DNA, 21 bp, Artificial Sequence
  Target HLA Sequence complement
tctcaacttcatggtgcactg

SEQ ID NO: 10878 - DNA, 21 bp, Artificial Sequence
  Target HLA Sequence complement
caacttcatggtgcactgagc

SEQ ID NO: 10879 - DNA, 21 bp, Artificial Sequence
  Target HLA Sequence complement
aacttcatggtgcactgagct

SEQ ID NO: 10880 - DNA, 21 bp, Artificial Sequence
  Target HLA Sequence complement
acttcatggtgcactgagctg

SEQ ID NO: 10881 - DNA, 21 bp, Artificial Sequence
  Target HLA Sequence complement
gagctgtaacttcttccttcc

SEQ ID NO: 10882 - DNA, 21 bp, Artificial Sequence
  Target HLA Sequence complement
agctgtaacttcttccttccc

SEQ ID NO: 10883 - DNA, 21 bp, Artificial Sequence
  Target HLA Sequence complement
gctgtaacttcttccttccct

SEQ ID NO: 10884 - DNA, 21 bp, Artificial Sequence
  Target HLA Sequence complement
aacttcttccttccctattaa

SEQ ID NO: 10885 - DNA, 22 bp, Artificial Sequence
  Target HLA Sequence complement
cccgaaggcggtgtatggattg

SEQ ID NO: 10886 - DNA, 22 bp, Artificial Sequence
  Target HLA Sequence complement
ccgaaggcggtgtatggattgg

SEQ ID NO: 10887 - DNA, 22 bp, Artificial Sequence
  Target HLA Sequence complement
cgaaggcggtgtatggattggg

SEQ ID NO: 10888 - DNA, 22 bp, Artificial Sequence
  Target HLA Sequence complement
tttctccctctcccaacctatg

SEQ ID NO: 10889 - DNA, 22 bp, Artificial Sequence
  Target HLA Sequence complement
ttctccctctcccaacctatgt

SEQ ID NO: 10890 - DNA, 22 bp, Artificial Sequence
  Target HLA Sequence complement
tctccctctcccaacctatgta

SEQ ID NO: 10891 - DNA, 22 bp, Artificial Sequence
  Target HLA Sequence complement
ctccctctcccaacctatgtag

SEQ ID NO: 10892 - DNA, 22 bp, Artificial Sequence
  Target HLA Sequence complement
tccctctcccaacctatgtagg

SEQ ID NO: 10893 - DNA, 22 bp, Artificial Sequence
  Target HLA Sequence complement
ccctctcccaacctatgtaggg

SEQ ID NO: 10894 - DNA, 22 bp, Artificial Sequence
  Target HLA Sequence complement
cctctcccaacctatgtagggt

SEQ ID NO: 10895 - DNA, 22 bp, Artificial Sequence
  Target HLA Sequence complement
ctctcccaacctatgtagggtc

SEQ ID NO: 10896 - DNA, 22 bp, Artificial Sequence
  Target HLA Sequence complement
tctcccaacctatgtagggtcc

SEQ ID NO: 10897 - DNA, 22 bp, Artificial Sequence
  Target HLA Sequence complement
ctcccaacctatgtagggtcct

SEQ ID NO: 10898 - DNA, 22 bp, Artificial Sequence
  Target HLA Sequence complement
tcccaacctatgtagggtcctt

SEQ ID NO: 10899 - DNA, 22 bp, Artificial Sequence
  Target HLA Sequence complement
cccaacctatgtagggtccttc

SEQ ID NO: 10900 - DNA, 22 bp, Artificial Sequence
  Target HLA Sequence complement
ccaacctatgtagggtccttct

SEQ ID NO: 10901 - DNA, 22 bp, Artificial Sequence
  Target HLA Sequence complement
caacctatgtagggtccttctt

SEQ ID NO: 10902 - DNA, 22 bp, Artificial Sequence
  Target HLA Sequence complement
aacctatgtagggtccttcttc

SEQ ID NO: 10903 - DNA, 22 bp, Artificial Sequence
  Target HLA Sequence complement
acctatgtagggtccttcttcc

SEQ ID NO: 10904 - DNA, 22 bp, Artificial Sequence
  Target HLA Sequence complement
cctatgtagggtccttcttcct

SEQ ID NO: 10905 - DNA, 22 bp, Artificial Sequence
  Target HLA Sequence complement
ctatgtagggtccttcttcctg

SEQ ID NO: 10906 - DNA, 22 bp, Artificial Sequence
  Target HLA Sequence complement
tatgtagggtccttcttcctgg

SEQ ID NO: 10907 - DNA, 22 bp, Artificial Sequence
  Target HLA Sequence complement
atgtagggtccttcttcctgga

SEQ ID NO: 10908 - DNA, 22 bp, Artificial Sequence
  Target HLA Sequence complement
tgtagggtccttcttcctggat

SEQ ID NO: 10909 - DNA, 22 bp, Artificial Sequence
  Target HLA Sequence complement
gtagggtccttcttcctggata

SEQ ID NO: 10910 - DNA, 22 bp, Artificial Sequence
  Target HLA Sequence complement
tagggtccttcttcctggatac

SEQ ID NO: 10911 - DNA, 22 bp, Artificial Sequence
  Target HLA Sequence complement
agggtccttcttcctggatact

SEQ ID NO: 10912 - DNA, 22 bp, Artificial Sequence
  Target HLA Sequence complement
gggtccttcttcctggatactc

SEQ ID NO: 10913 - DNA, 22 bp, Artificial Sequence
  Target HLA Sequence complement
ggtccttcttcctggatactca

SEQ ID NO: 10914 - DNA, 22 bp, Artificial Sequence
  Target HLA Sequence complement
gtccttcttcctggatactcac

SEQ ID NO: 10915 - DNA, 22 bp, Artificial Sequence
  Target HLA Sequence complement
tccttcttcctggatactcacg

SEQ ID NO: 10916 - DNA, 22 bp, Artificial Sequence
  Target HLA Sequence complement
ccttcttcctggatactcacga

SEQ ID NO: 10917 - DNA, 22 bp, Artificial Sequence
  Target HLA Sequence complement
cttcttcctggatactcacgac

SEQ ID NO: 10918 - DNA, 22 bp, Artificial Sequence
  Target HLA Sequence complement
ttcttcctggatactcacgacg

SEQ ID NO: 10919 - DNA, 22 bp, Artificial Sequence
  Target HLA Sequence complement
tcttcctggatactcacgacgc

SEQ ID NO: 10920 - DNA, 22 bp, Artificial Sequence
  Target HLA Sequence complement
cttcctggatactcacgacgcg

SEQ ID NO: 10921 - DNA, 22 bp, Artificial Sequence
  Target HLA Sequence complement
ttcctggatactcacgacgcgg

SEQ ID NO: 10922 - DNA, 22 bp, Artificial Sequence
  Target HLA Sequence complement
tcctggatactcacgacgcgga

SEQ ID NO: 10923 - DNA, 22 bp, Artificial Sequence
  Target HLA Sequence complement
atactcacgacgcggacccagt

SEQ ID NO: 10924 - DNA, 22 bp, Artificial Sequence
  Target HLA Sequence complement
tactcacgacgcggacccagtt

SEQ ID NO: 10925 - DNA, 22 bp, Artificial Sequence
  Target HLA Sequence complement
cggacccagttctcactcccat

SEQ ID NO: 10926 - DNA, 22 bp, Artificial Sequence
  Target HLA Sequence complement
ggacccagttctcactcccatt

SEQ ID NO: 10927 - DNA, 22 bp, Artificial Sequence
  Target HLA Sequence complement
gacccagttctcactcccattg

SEQ ID NO: 10928 - DNA, 22 bp, Artificial Sequence
  Target HLA Sequence complement
acccagttctcactcccattgg

SEQ ID NO: 10929 - DNA, 22 bp, Artificial Sequence
  Target HLA Sequence complement
cccagttctcactcccattggg

SEQ ID NO: 10930 - DNA, 22 bp, Artificial Sequence
  Target HLA Sequence complement
ccagttctcactcccattgggt

SEQ ID NO: 10931 - DNA, 22 bp, Artificial Sequence
  Target HLA Sequence complement
cagttctcactcccattgggtg

SEQ ID NO: 10932 - DNA, 22 bp, Artificial Sequence
  Target HLA Sequence complement
agttctcactcccattgggtgt

SEQ ID NO: 10933 - DNA, 22 bp, Artificial Sequence
  Target HLA Sequence complement
gttctcactcccattgggtgtc

SEQ ID NO: 10934 - DNA, 22 bp, Artificial Sequence
  Target HLA Sequence complement
ttctcactcccattgggtgtcg

SEQ ID NO: 10935 - DNA, 22 bp, Artificial Sequence
  Target HLA Sequence complement
tctcactcccattgggtgtcgg

SEQ ID NO: 10936 - DNA, 22 bp, Artificial Sequence
  Target HLA Sequence complement
tcactcccattgggtgtcgggt

SEQ ID NO: 10937 - DNA, 22 bp, Artificial Sequence
  Target HLA Sequence complement
cactcccattgggtgtcgggtt

SEQ ID NO: 10938 - DNA, 22 bp, Artificial Sequence
  Target HLA Sequence complement
actcccattgggtgtcgggttt

SEQ ID NO: 10939 - DNA, 22 bp, Artificial Sequence
  Target HLA Sequence complement
ctcccattgggtgtcgggtttc

SEQ ID NO: 10940 - DNA, 22 bp, Artificial Sequence
  Target HLA Sequence complement
tcccattgggtgtcgggtttcc

SEQ ID NO: 10941 - DNA, 22 bp, Artificial Sequence
  Target HLA Sequence complement
cccattgggtgtcgggtttcca

SEQ ID NO: 10942 - DNA, 22 bp, Artificial Sequence
  Target HLA Sequence complement
ccattgggtgtcgggtttccag

SEQ ID NO: 10943 - DNA, 22 bp, Artificial Sequence
  Target HLA Sequence complement
cattgggtgtcgggtttccaga

SEQ ID NO: 10944 - DNA, 22 bp, Artificial Sequence
  Target HLA Sequence complement
attgggtgtcgggtttccagag

SEQ ID NO: 10945 - DNA, 22 bp, Artificial Sequence
  Target HLA Sequence complement
ttgggtgtcgggtttccagaga

SEQ ID NO: 10946 - DNA, 22 bp, Artificial Sequence
  Target HLA Sequence complement
tgggtgtcgggtttccagagaa

SEQ ID NO: 10947 - DNA, 22 bp, Artificial Sequence
  Target HLA Sequence complement
gggtgtcgggtttccagagaag

SEQ ID NO: 10948 - DNA, 22 bp, Artificial Sequence
  Target HLA Sequence complement
ggtgtcgggtttccagagaagc

SEQ ID NO: 10949 - DNA, 22 bp, Artificial Sequence
  Target HLA Sequence complement
gtgtcgggtttccagagaagcc

SEQ ID NO: 10950 - DNA, 22 bp, Artificial Sequence
  Target HLA Sequence complement
tgtcgggtttccagagaagcca

SEQ ID NO: 10951 - DNA, 22 bp, Artificial Sequence
  Target HLA Sequence complement
gtcgggtttccagagaagccaa

SEQ ID NO: 10952 - DNA, 22 bp, Artificial Sequence
  Target HLA Sequence complement
tcgggtttccagagaagccaat

SEQ ID NO: 10953 - DNA, 22 bp, Artificial Sequence
  Target HLA Sequence complement
cgggtttccagagaagccaatc

SEQ ID NO: 10954 - DNA, 22 bp, Artificial Sequence
  Target HLA Sequence complement
gggtttccagagaagccaatca

SEQ ID NO: 10955 - DNA, 22 bp, Artificial Sequence
  Target HLA Sequence complement
ggtttccagagaagccaatcag

SEQ ID NO: 10956 - DNA, 22 bp, Artificial Sequence
  Target HLA Sequence complement
gtttccagagaagccaatcagt

SEQ ID NO: 10957 - DNA, 22 bp, Artificial Sequence
  Target HLA Sequence complement
tttccagagaagccaatcagtg

SEQ ID NO: 10958 - DNA, 22 bp, Artificial Sequence
  Target HLA Sequence complement
ttccagagaagccaatcagtgt

SEQ ID NO: 10959 - DNA, 22 bp, Artificial Sequence
  Target HLA Sequence complement
tccagagaagccaatcagtgtc

SEQ ID NO: 10960 - DNA, 22 bp, Artificial Sequence
  Target HLA Sequence complement
ccagagaagccaatcagtgtcg

SEQ ID NO: 10961 - DNA, 22 bp, Artificial Sequence
  Target HLA Sequence complement
cagagaagccaatcagtgtcgt

SEQ ID NO: 10962 - DNA, 22 bp, Artificial Sequence
  Target HLA Sequence complement
agagaagccaatcagtgtcgtc

SEQ ID NO: 10963 - DNA, 22 bp, Artificial Sequence
  Target HLA Sequence complement
gagaagccaatcagtgtcgtcg

SEQ ID NO: 10964 - DNA, 22 bp, Artificial Sequence
  Target HLA Sequence complement
agaagccaatcagtgtcgtcgc

SEQ ID NO: 10965 - DNA, 22 bp, Artificial Sequence
  Target HLA Sequence complement
gaagccaatcagtgtcgtcgcg

SEQ ID NO: 10966 - DNA, 22 bp, Artificial Sequence
  Target HLA Sequence complement
aagccaatcagtgtcgtcgcgg

SEQ ID NO: 10967 - DNA, 22 bp, Artificial Sequence
  Target HLA Sequence complement
agccaatcagtgtcgtcgcggt

SEQ ID NO: 10968 - DNA, 22 bp, Artificial Sequence
  Target HLA Sequence complement
tcgtcgcggtcgcggttctaaa

SEQ ID NO: 10969 - DNA, 22 bp, Artificial Sequence
  Target HLA Sequence complement
gtcgcggtcgcggttctaaagt

SEQ ID NO: 10970 - DNA, 22 bp, Artificial Sequence
  Target HLA Sequence complement
tcgcggtcgcggttctaaagtc

SEQ ID NO: 10971 - DNA, 22 bp, Artificial Sequence
  Target HLA Sequence complement
ggtcgcggttctaaagtccgca

SEQ ID NO: 10972 - DNA, 22 bp, Artificial Sequence
  Target HLA Sequence complement
gtcgcggttctaaagtccgcac

SEQ ID NO: 10973 - DNA, 22 bp, Artificial Sequence
  Target HLA Sequence complement
tcgcggttctaaagtccgcacg

SEQ ID NO: 10974 - DNA, 22 bp, Artificial Sequence
  Target HLA Sequence complement
gcggttctaaagtccgcacgca

SEQ ID NO: 10975 - DNA, 22 bp, Artificial Sequence
  Target HLA Sequence complement
cggttctaaagtccgcacgcac

SEQ ID NO: 10976 - DNA, 22 bp, Artificial Sequence
  Target HLA Sequence complement
ggttctaaagtccgcacgcacc

SEQ ID NO: 10977 - DNA, 22 bp, Artificial Sequence
  Target HLA Sequence complement
gttctaaagtccgcacgcaccc

SEQ ID NO: 10978 - DNA, 22 bp, Artificial Sequence
  Target HLA Sequence complement
ttctaaagtccgcacgcaccca

SEQ ID NO: 10979 - DNA, 22 bp, Artificial Sequence
  Target HLA Sequence complement
tctaaagtccgcacgcacccac

SEQ ID NO: 10980 - DNA, 22 bp, Artificial Sequence
  Target HLA Sequence complement
cacccaccgggactcagattct

SEQ ID NO: 10981 - DNA, 22 bp, Artificial Sequence
  Target HLA Sequence complement
acccaccgggactcagattctc

SEQ ID NO: 10982 - DNA, 22 bp, Artificial Sequence
  Target HLA Sequence complement
cgaaccctcgtcctgctactct

SEQ ID NO: 10983 - DNA, 22 bp, Artificial Sequence
  Target HLA Sequence complement
gaaccctcgtcctgctactctc

SEQ ID NO: 10984 - DNA, 22 bp, Artificial Sequence
  Target HLA Sequence complement
aaccctcgtcctgctactctcg

SEQ ID NO: 10985 - DNA, 22 bp, Artificial Sequence
  Target HLA Sequence complement
cgggctctcactccatgaggta

SEQ ID NO: 10986 - DNA, 22 bp, Artificial Sequence
  Target HLA Sequence complement
gggctctcactccatgaggtat

SEQ ID NO: 10987 - DNA, 22 bp, Artificial Sequence
  Target HLA Sequence complement
ggctctcactccatgaggtatt

SEQ ID NO: 10988 - DNA, 22 bp, Artificial Sequence
  Target HLA Sequence complement
gctctcactccatgaggtattt

SEQ ID NO: 10989 - DNA, 22 bp, Artificial Sequence
  Target HLA Sequence complement
ctctcactccatgaggtatttc

SEQ ID NO: 10990 - DNA, 22 bp, Artificial Sequence
  Target HLA Sequence complement
tctcactccatgaggtatttct

SEQ ID NO: 10991 - DNA, 22 bp, Artificial Sequence
  Target HLA Sequence complement
ctcactccatgaggtatttctt

SEQ ID NO: 10992 - DNA, 22 bp, Artificial Sequence
  Target HLA Sequence complement
tcactccatgaggtatttcttc

SEQ ID NO: 10993 - DNA, 22 bp, Artificial Sequence
  Target HLA Sequence complement
cactccatgaggtatttcttca

SEQ ID NO: 10994 - DNA, 22 bp, Artificial Sequence
  Target HLA Sequence complement
actccatgaggtatttcttcac

SEQ ID NO: 10995 - DNA, 22 bp, Artificial Sequence
  Target HLA Sequence complement
ctccatgaggtatttcttcaca

SEQ ID NO: 10996 - DNA, 22 bp, Artificial Sequence
  Target HLA Sequence complement
tccatgaggtatttcttcacat

SEQ ID NO: 10997 - DNA, 22 bp, Artificial Sequence
  Target HLA Sequence complement
ccatgaggtatttcttcacatc

SEQ ID NO: 10998 - DNA, 22 bp, Artificial Sequence
  Target HLA Sequence complement
catgaggtatttcttcacatcc

SEQ ID NO: 10999 - DNA, 22 bp, Artificial Sequence
  Target HLA Sequence complement
atgaggtatttcttcacatccg

SEQ ID NO: 11000 - DNA, 22 bp, Artificial Sequence
  Target HLA Sequence complement
tgaggtatttcttcacatccgt

SEQ ID NO: 11001 - DNA, 22 bp, Artificial Sequence
  Target HLA Sequence complement
gaggtatttcttcacatccgtg

SEQ ID NO: 11002 - DNA, 22 bp, Artificial Sequence
  Target HLA Sequence complement
aggtatttcttcacatccgtgt

SEQ ID NO: 11003 - DNA, 22 bp, Artificial Sequence
  Target HLA Sequence complement
ggtatttcttcacatccgtgtc

SEQ ID NO: 11004 - DNA, 22 bp, Artificial Sequence
  Target HLA Sequence complement
gtatttcttcacatccgtgtcc

SEQ ID NO: 11005 - DNA, 22 bp, Artificial Sequence
  Target HLA Sequence complement
tatttcttcacatccgtgtccc

SEQ ID NO: 11006 - DNA, 22 bp, Artificial Sequence
  Target HLA Sequence complement
atttcttcacatccgtgtcccg

SEQ ID NO: 11007 - DNA, 22 bp, Artificial Sequence
  Target HLA Sequence complement
tttcttcacatccgtgtcccgg

SEQ ID NO: 11008 - DNA, 22 bp, Artificial Sequence
  Target HLA Sequence complement
ttcttcacatccgtgtcccggc

SEQ ID NO: 11009 - DNA, 22 bp, Artificial Sequence
  Target HLA Sequence complement
gcttcatcgcagtgggctacgt

SEQ ID NO: 11010 - DNA, 22 bp, Artificial Sequence
  Target HLA Sequence complement
cttcatcgcagtgggctacgtg

SEQ ID NO: 11011 - DNA, 22 bp, Artificial Sequence
  Target HLA Sequence complement
ttcatcgcagtgggctacgtgg

SEQ ID NO: 11012 - DNA, 22 bp, Artificial Sequence
  Target HLA Sequence complement
tcatcgcagtgggctacgtgga

SEQ ID NO: 11013 - DNA, 22 bp, Artificial Sequence
  Target HLA Sequence complement
gctacgtggacgacacgcagtt

SEQ ID NO: 11014 - DNA, 22 bp, Artificial Sequence
  Target HLA Sequence complement
ctacgtggacgacacgcagttc

SEQ ID NO: 11015 - DNA, 22 bp, Artificial Sequence
  Target HLA Sequence complement
tacgtggacgacacgcagttcg

SEQ ID NO: 11016 - DNA, 22 bp, Artificial Sequence
  Target HLA Sequence complement
acgtggacgacacgcagttcgt

SEQ ID NO: 11017 - DNA, 22 bp, Artificial Sequence
  Target HLA Sequence complement
acgacacgcagttcgtgcggtt

SEQ ID NO: 11018 - DNA, 22 bp, Artificial Sequence
  Target HLA Sequence complement
acacgcagttcgtgcggttcga

SEQ ID NO: 11019 - DNA, 22 bp, Artificial Sequence
  Target HLA Sequence complement
acgcagttcgtgcggttcgaca

SEQ ID NO: 11020 - DNA, 22 bp, Artificial Sequence
  Target HLA Sequence complement
agttcgtgcggttcgacagcga

SEQ ID NO: 11021 - DNA, 22 bp, Artificial Sequence
  Target HLA Sequence complement
atagagcaggagggtccggagt

SEQ ID NO: 11022 - DNA, 22 bp, Artificial Sequence
  Target HLA Sequence complement
tagagcaggagggtccggagta

SEQ ID NO: 11023 - DNA, 22 bp, Artificial Sequence
  Target HLA Sequence complement
agagcaggagggtccggagtat

SEQ ID NO: 11024 - DNA, 22 bp, Artificial Sequence
  Target HLA Sequence complement
gagcaggagggtccggagtatt

SEQ ID NO: 11025 - DNA, 22 bp, Artificial Sequence
  Target HLA Sequence complement
agcaggagggtccggagtattg

SEQ ID NO: 11026 - DNA, 22 bp, Artificial Sequence
  Target HLA Sequence complement
aggagggtccggagtattggga

SEQ ID NO: 11027 - DNA, 22 bp, Artificial Sequence
  Target HLA Sequence complement
gggagacacggaaagtgaaggc

SEQ ID NO: 11028 - DNA, 22 bp, Artificial Sequence
  Target HLA Sequence complement
ggagacacggaaagtgaaggcc

SEQ ID NO: 11029 - DNA, 22 bp, Artificial Sequence
  Target HLA Sequence complement
gagacacggaaagtgaaggccc

SEQ ID NO: 11030 - DNA, 22 bp, Artificial Sequence
  Target HLA Sequence complement
agacacggaaagtgaaggccca

SEQ ID NO: 11031 - DNA, 22 bp, Artificial Sequence
  Target HLA Sequence complement
gacacggaaagtgaaggcccac

SEQ ID NO: 11032 - DNA, 22 bp, Artificial Sequence
  Target HLA Sequence complement
acacggaaagtgaaggcccact

SEQ ID NO: 11033 - DNA, 22 bp, Artificial Sequence
  Target HLA Sequence complement
cacggaaagtgaaggcccactc

SEQ ID NO: 11034 - DNA, 22 bp, Artificial Sequence
  Target HLA Sequence complement
acggaaagtgaaggcccactca

SEQ ID NO: 11035 - DNA, 22 bp, Artificial Sequence
  Target HLA Sequence complement
cggaaagtgaaggcccactcac

SEQ ID NO: 11036 - DNA, 22 bp, Artificial Sequence
  Target HLA Sequence complement
ggaaagtgaaggcccactcaca

SEQ ID NO: 11037 - DNA, 22 bp, Artificial Sequence
  Target HLA Sequence complement
gaaagtgaaggcccactcacag

SEQ ID NO: 11038 - DNA, 22 bp, Artificial Sequence
  Target HLA Sequence complement
aaagtgaaggcccactcacaga

SEQ ID NO: 11039 - DNA, 22 bp, Artificial Sequence
  Target HLA Sequence complement
aagtgaaggcccactcacagac

SEQ ID NO: 11040 - DNA, 22 bp, Artificial Sequence
  Target HLA Sequence complement
agtgaaggcccactcacagact

SEQ ID NO: 11041 - DNA, 22 bp, Artificial Sequence
  Target HLA Sequence complement
gtgaaggcccactcacagactc

SEQ ID NO: 11042 - DNA, 22 bp, Artificial Sequence
  Target HLA Sequence complement
tgaaggcccactcacagactca

SEQ ID NO: 11043 - DNA, 22 bp, Artificial Sequence
  Target HLA Sequence complement
gaaggcccactcacagactcac

SEQ ID NO: 11044 - DNA, 22 bp, Artificial Sequence
  Target HLA Sequence complement
aaggcccactcacagactcacc

SEQ ID NO: 11045 - DNA, 22 bp, Artificial Sequence
  Target HLA Sequence complement
cccactcacagactcaccgagt

SEQ ID NO: 11046 - DNA, 22 bp, Artificial Sequence
  Target HLA Sequence complement
ccactcacagactcaccgagtg

SEQ ID NO: 11047 - DNA, 22 bp, Artificial Sequence
  Target HLA Sequence complement
cactcacagactcaccgagtgg

SEQ ID NO: 11048 - DNA, 22 bp, Artificial Sequence
  Target HLA Sequence complement
actcacagactcaccgagtgga

SEQ ID NO: 11049 - DNA, 22 bp, Artificial Sequence
  Target HLA Sequence complement
ctcacagactcaccgagtggac

SEQ ID NO: 11050 - DNA, 22 bp, Artificial Sequence
  Target HLA Sequence complement
tcacagactcaccgagtggacc

SEQ ID NO: 11051 - DNA, 22 bp, Artificial Sequence
  Target HLA Sequence complement
cacagactcaccgagtggacct

SEQ ID NO: 11052 - DNA, 22 bp, Artificial Sequence
  Target HLA Sequence complement
acagactcaccgagtggacctg

SEQ ID NO: 11053 - DNA, 22 bp, Artificial Sequence
  Target HLA Sequence complement
gcggctactacaaccagagcga

SEQ ID NO: 11054 - DNA, 22 bp, Artificial Sequence
  Target HLA Sequence complement
cggctactacaaccagagcgag

SEQ ID NO: 11055 - DNA, 22 bp, Artificial Sequence
  Target HLA Sequence complement
ggctactacaaccagagcgagg

SEQ ID NO: 11056 - DNA, 22 bp, Artificial Sequence
  Target HLA Sequence complement
gctactacaaccagagcgaggc

SEQ ID NO: 11057 - DNA, 22 bp, Artificial Sequence
  Target HLA Sequence complement
ctactacaaccagagcgaggcc

SEQ ID NO: 11058 - DNA, 22 bp, Artificial Sequence
  Target HLA Sequence complement
tactacaaccagagcgaggccg

SEQ ID NO: 11059 - DNA, 22 bp, Artificial Sequence
  Target HLA Sequence complement
tacaaccagagcgaggccggtt

SEQ ID NO: 11060 - DNA, 22 bp, Artificial Sequence
  Target HLA Sequence complement
ggttctcacaccgtccagagga

SEQ ID NO: 11061 - DNA, 22 bp, Artificial Sequence
  Target HLA Sequence complement
gttctcacaccgtccagaggat

SEQ ID NO: 11062 - DNA, 22 bp, Artificial Sequence
  Target HLA Sequence complement
ttctcacaccgtccagaggatg

SEQ ID NO: 11063 - DNA, 22 bp, Artificial Sequence
  Target HLA Sequence complement
tctcacaccgtccagaggatgt

SEQ ID NO: 11064 - DNA, 22 bp, Artificial Sequence
  Target HLA Sequence complement
ctcacaccgtccagaggatgta

SEQ ID NO: 11065 - DNA, 22 bp, Artificial Sequence
  Target HLA Sequence complement
tcacaccgtccagaggatgtat

SEQ ID NO: 11066 - DNA, 22 bp, Artificial Sequence
  Target HLA Sequence complement
cacaccgtccagaggatgtatg

SEQ ID NO: 11067 - DNA, 22 bp, Artificial Sequence
  Target HLA Sequence complement
acaccgtccagaggatgtatgg

SEQ ID NO: 11068 - DNA, 22 bp, Artificial Sequence
  Target HLA Sequence complement
caccgtccagaggatgtatggc

SEQ ID NO: 11069 - DNA, 22 bp, Artificial Sequence
  Target HLA Sequence complement
accgtccagaggatgtatggct

SEQ ID NO: 11070 - DNA, 22 bp, Artificial Sequence
  Target HLA Sequence complement
ccgtccagaggatgtatggctg

SEQ ID NO: 11071 - DNA, 22 bp, Artificial Sequence
  Target HLA Sequence complement
cgtccagaggatgtatggctgc

SEQ ID NO: 11072 - DNA, 22 bp, Artificial Sequence
  Target HLA Sequence complement
gtccagaggatgtatggctgcg

SEQ ID NO: 11073 - DNA, 22 bp, Artificial Sequence
  Target HLA Sequence complement
tccagaggatgtatggctgcga

SEQ ID NO: 11074 - DNA, 22 bp, Artificial Sequence
  Target HLA Sequence complement
ccagaggatgtatggctgcgac

SEQ ID NO: 11075 - DNA, 22 bp, Artificial Sequence
  Target HLA Sequence complement
cagaggatgtatggctgcgacg

SEQ ID NO: 11076 - DNA, 22 bp, Artificial Sequence
  Target HLA Sequence complement
agaggatgtatggctgcgacgt

SEQ ID NO: 11077 - DNA, 22 bp, Artificial Sequence
  Target HLA Sequence complement
gaggatgtatggctgcgacgtg

SEQ ID NO: 11078 - DNA, 22 bp, Artificial Sequence
  Target HLA Sequence complement
aggatgtatggctgcgacgtgg

SEQ ID NO: 11079 - DNA, 22 bp, Artificial Sequence
  Target HLA Sequence complement
ggtaccaccagtacgcctacga

SEQ ID NO: 11080 - DNA, 22 bp, Artificial Sequence
  Target HLA Sequence complement
gtaccaccagtacgcctacgac

SEQ ID NO: 11081 - DNA, 22 bp, Artificial Sequence
  Target HLA Sequence complement
taccaccagtacgcctacgacg

SEQ ID NO: 11082 - DNA, 22 bp, Artificial Sequence
  Target HLA Sequence complement
accagtacgcctacgacggcaa

SEQ ID NO: 11083 - DNA, 22 bp, Artificial Sequence
  Target HLA Sequence complement
agtacgcctacgacggcaagga

SEQ ID NO: 11084 - DNA, 22 bp, Artificial Sequence
  Target HLA Sequence complement
gtacgcctacgacggcaaggat

SEQ ID NO: 11085 - DNA, 22 bp, Artificial Sequence
  Target HLA Sequence complement
tacgcctacgacggcaaggatt

SEQ ID NO: 11086 - DNA, 22 bp, Artificial Sequence
  Target HLA Sequence complement
acgcctacgacggcaaggatta

SEQ ID NO: 11087 - DNA, 22 bp, Artificial Sequence
  Target HLA Sequence complement
cgcctacgacggcaaggattac

SEQ ID NO: 11088 - DNA, 22 bp, Artificial Sequence
  Target HLA Sequence complement
gcctacgacggcaaggattaca

SEQ ID NO: 11089 - DNA, 22 bp, Artificial Sequence
  Target HLA Sequence complement
cctacgacggcaaggattacat

SEQ ID NO: 11090 - DNA, 22 bp, Artificial Sequence
  Target HLA Sequence complement
ctacgacggcaaggattacatc

SEQ ID NO: 11091 - DNA, 22 bp, Artificial Sequence
  Target HLA Sequence complement
tacgacggcaaggattacatcg

SEQ ID NO: 11092 - DNA, 22 bp, Artificial Sequence
  Target HLA Sequence complement
acgacggcaaggattacatcgc

SEQ ID NO: 11093 - DNA, 22 bp, Artificial Sequence
  Target HLA Sequence complement
cgacggcaaggattacatcgcc

SEQ ID NO: 11094 - DNA, 22 bp, Artificial Sequence
  Target HLA Sequence complement
gacggcaaggattacatcgccc

SEQ ID NO: 11095 - DNA, 22 bp, Artificial Sequence
  Target HLA Sequence complement
acggcaaggattacatcgccct

SEQ ID NO: 11096 - DNA, 22 bp, Artificial Sequence
  Target HLA Sequence complement
cggcaaggattacatcgccctg

SEQ ID NO: 11097 - DNA, 22 bp, Artificial Sequence
  Target HLA Sequence complement
ggcaaggattacatcgccctga

SEQ ID NO: 11098 - DNA, 22 bp, Artificial Sequence
  Target HLA Sequence complement
gcaaggattacatcgccctgaa

SEQ ID NO: 11099 - DNA, 22 bp, Artificial Sequence
  Target HLA Sequence complement
caaggattacatcgccctgaaa

SEQ ID NO: 11100 - DNA, 22 bp, Artificial Sequence
  Target HLA Sequence complement
aaggattacatcgccctgaaag

SEQ ID NO: 11101 - DNA, 22 bp, Artificial Sequence
  Target HLA Sequence complement
aggattacatcgccctgaaaga

SEQ ID NO: 11102 - DNA, 22 bp, Artificial Sequence
  Target HLA Sequence complement
ggattacatcgccctgaaagag

SEQ ID NO: 11103 - DNA, 22 bp, Artificial Sequence
  Target HLA Sequence complement
gattacatcgccctgaaagagg

SEQ ID NO: 11104 - DNA, 22 bp, Artificial Sequence
  Target HLA Sequence complement
attacatcgccctgaaagagga

SEQ ID NO: 11105 - DNA, 22 bp, Artificial Sequence
  Target HLA Sequence complement
ttacatcgccctgaaagaggac

SEQ ID NO: 11106 - DNA, 22 bp, Artificial Sequence
  Target HLA Sequence complement
tacatcgccctgaaagaggacc

SEQ ID NO: 11107 - DNA, 22 bp, Artificial Sequence
  Target HLA Sequence complement
acatcgccctgaaagaggacct

SEQ ID NO: 11108 - DNA, 22 bp, Artificial Sequence
  Target HLA Sequence complement
catcgccctgaaagaggacctg

SEQ ID NO: 11109 - DNA, 22 bp, Artificial Sequence
  Target HLA Sequence complement
atcgccctgaaagaggacctgc

SEQ ID NO: 11110 - DNA, 22 bp, Artificial Sequence
  Target HLA Sequence complement
cctgaaagaggacctgcgctct

SEQ ID NO: 11111 - DNA, 22 bp, Artificial Sequence
  Target HLA Sequence complement
ctgaaagaggacctgcgctctt

SEQ ID NO: 11112 - DNA, 22 bp, Artificial Sequence
  Target HLA Sequence complement
tgaaagaggacctgcgctcttg

SEQ ID NO: 11113 - DNA, 22 bp, Artificial Sequence
  Target HLA Sequence complement
gaaagaggacctgcgctcttgg

SEQ ID NO: 11114 - DNA, 22 bp, Artificial Sequence
  Target HLA Sequence complement
aaagaggacctgcgctcttgga

SEQ ID NO: 11115 - DNA, 22 bp, Artificial Sequence
  Target HLA Sequence complement
aagaggacctgcgctcttggac

SEQ ID NO: 11116 - DNA, 22 bp, Artificial Sequence
  Target HLA Sequence complement
gacatggcagctcagaccacca

SEQ ID NO: 11117 - DNA, 22 bp, Artificial Sequence
  Target HLA Sequence complement
acatggcagctcagaccaccaa

SEQ ID NO: 11118 - DNA, 22 bp, Artificial Sequence
  Target HLA Sequence complement
catggcagctcagaccaccaag

SEQ ID NO: 11119 - DNA, 22 bp, Artificial Sequence
  Target HLA Sequence complement
atggcagctcagaccaccaagc

SEQ ID NO: 11120 - DNA, 22 bp, Artificial Sequence
  Target HLA Sequence complement
tggcagctcagaccaccaagca

SEQ ID NO: 11121 - DNA, 22 bp, Artificial Sequence
  Target HLA Sequence complement
gcagctcagaccaccaagcaca

SEQ ID NO: 11122 - DNA, 22 bp, Artificial Sequence
  Target HLA Sequence complement
cagctcagaccaccaagcacaa

SEQ ID NO: 11123 - DNA, 22 bp, Artificial Sequence
  Target HLA Sequence complement
agctcagaccaccaagcacaag

SEQ ID NO: 11124 - DNA, 22 bp, Artificial Sequence
  Target HLA Sequence complement
gctcagaccaccaagcacaagt

SEQ ID NO: 11125 - DNA, 22 bp, Artificial Sequence
  Target HLA Sequence complement
ctcagaccaccaagcacaagtg

SEQ ID NO: 11126 - DNA, 22 bp, Artificial Sequence
  Target HLA Sequence complement
tcagaccaccaagcacaagtgg

SEQ ID NO: 11127 - DNA, 22 bp, Artificial Sequence
  Target HLA Sequence complement
cagaccaccaagcacaagtggg

SEQ ID NO: 11128 - DNA, 22 bp, Artificial Sequence
  Target HLA Sequence complement
agaccaccaagcacaagtggga

SEQ ID NO: 11129 - DNA, 22 bp, Artificial Sequence
  Target HLA Sequence complement
gaccaccaagcacaagtgggag

SEQ ID NO: 11130 - DNA, 22 bp, Artificial Sequence
  Target HLA Sequence complement
accaccaagcacaagtgggagg

SEQ ID NO: 11131 - DNA, 22 bp, Artificial Sequence
  Target HLA Sequence complement
ccatgtggcggagcagttgaga

SEQ ID NO: 11132 - DNA, 22 bp, Artificial Sequence
  Target HLA Sequence complement
catgtggcggagcagttgagag

SEQ ID NO: 11133 - DNA, 22 bp, Artificial Sequence
  Target HLA Sequence complement
atgtggcggagcagttgagagc

SEQ ID NO: 11134 - DNA, 22 bp, Artificial Sequence
  Target HLA Sequence complement
tggcggagcagttgagagccta

SEQ ID NO: 11135 - DNA, 22 bp, Artificial Sequence
  Target HLA Sequence complement
cggagcagttgagagcctacct

SEQ ID NO: 11136 - DNA, 22 bp, Artificial Sequence
  Target HLA Sequence complement
ggagcagttgagagcctacctg

SEQ ID NO: 11137 - DNA, 22 bp, Artificial Sequence
  Target HLA Sequence complement
gagcagttgagagcctacctgg

SEQ ID NO: 11138 - DNA, 22 bp, Artificial Sequence
  Target HLA Sequence complement
agcagttgagagcctacctgga

SEQ ID NO: 11139 - DNA, 22 bp, Artificial Sequence
  Target HLA Sequence complement
gcagttgagagcctacctggag

SEQ ID NO: 11140 - DNA, 22 bp, Artificial Sequence
  Target HLA Sequence complement
cagttgagagcctacctggagg

SEQ ID NO: 11141 - DNA, 22 bp, Artificial Sequence
  Target HLA Sequence complement
agttgagagcctacctggaggg

SEQ ID NO: 11142 - DNA, 22 bp, Artificial Sequence
  Target HLA Sequence complement
ttgagagcctacctggagggca

SEQ ID NO: 11143 - DNA, 22 bp, Artificial Sequence
  Target HLA Sequence complement
tggagtggctccgcagatacct

SEQ ID NO: 11144 - DNA, 22 bp, Artificial Sequence
  Target HLA Sequence complement
agtggctccgcagatacctgga

SEQ ID NO: 11145 - DNA, 22 bp, Artificial Sequence
  Target HLA Sequence complement
tggctccgcagatacctggaga

SEQ ID NO: 11146 - DNA, 22 bp, Artificial Sequence
  Target HLA Sequence complement
ggctccgcagatacctggagaa

SEQ ID NO: 11147 - DNA, 22 bp, Artificial Sequence
  Target HLA Sequence complement
gctccgcagatacctggagaac

SEQ ID NO: 11148 - DNA, 22 bp, Artificial Sequence
  Target HLA Sequence complement
ctccgcagatacctggagaacg

SEQ ID NO: 11149 - DNA, 22 bp, Artificial Sequence
  Target HLA Sequence complement
tccgcagatacctggagaacgg

SEQ ID NO: 11150 - DNA, 22 bp, Artificial Sequence
  Target HLA Sequence complement
cgcagatacctggagaacggga

SEQ ID NO: 11151 - DNA, 22 bp, Artificial Sequence
  Target HLA Sequence complement
gcagatacctggagaacgggaa

SEQ ID NO: 11152 - DNA, 22 bp, Artificial Sequence
  Target HLA Sequence complement
cagatacctggagaacgggaag

SEQ ID NO: 11153 - DNA, 22 bp, Artificial Sequence
  Target HLA Sequence complement
agatacctggagaacgggaagg

SEQ ID NO: 11154 - DNA, 22 bp, Artificial Sequence
  Target HLA Sequence complement
gatacctggagaacgggaagga

SEQ ID NO: 11155 - DNA, 22 bp, Artificial Sequence
  Target HLA Sequence complement
atacctggagaacgggaaggag

SEQ ID NO: 11156 - DNA, 22 bp, Artificial Sequence
  Target HLA Sequence complement
tacctggagaacgggaaggaga

SEQ ID NO: 11157 - DNA, 22 bp, Artificial Sequence
  Target HLA Sequence complement
acctggagaacgggaaggagac

SEQ ID NO: 11158 - DNA, 22 bp, Artificial Sequence
  Target HLA Sequence complement
tggagaacgggaaggagacgct

SEQ ID NO: 11159 - DNA, 22 bp, Artificial Sequence
  Target HLA Sequence complement
agaacgggaaggagacgctgca

SEQ ID NO: 11160 - DNA, 22 bp, Artificial Sequence
  Target HLA Sequence complement
aaacgcatatgactcaccacgc

SEQ ID NO: 11161 - DNA, 22 bp, Artificial Sequence
  Target HLA Sequence complement
aacgcatatgactcaccacgct

SEQ ID NO: 11162 - DNA, 22 bp, Artificial Sequence
  Target HLA Sequence complement
acgcatatgactcaccacgctg

SEQ ID NO: 11163 - DNA, 22 bp, Artificial Sequence
  Target HLA Sequence complement
cgcatatgactcaccacgctgt

SEQ ID NO: 11164 - DNA, 22 bp, Artificial Sequence
  Target HLA Sequence complement
gcatatgactcaccacgctgtc

SEQ ID NO: 11165 - DNA, 22 bp, Artificial Sequence
  Target HLA Sequence complement
catatgactcaccacgctgtct

SEQ ID NO: 11166 - DNA, 22 bp, Artificial Sequence
  Target HLA Sequence complement
atatgactcaccacgctgtctc

SEQ ID NO: 11167 - DNA, 22 bp, Artificial Sequence
  Target HLA Sequence complement
tatgactcaccacgctgtctct

SEQ ID NO: 11168 - DNA, 22 bp, Artificial Sequence
  Target HLA Sequence complement
atgactcaccacgctgtctctg

SEQ ID NO: 11169 - DNA, 22 bp, Artificial Sequence
  Target HLA Sequence complement
tgactcaccacgctgtctctga

SEQ ID NO: 11170 - DNA, 22 bp, Artificial Sequence
  Target HLA Sequence complement
gactcaccacgctgtctctgac

SEQ ID NO: 11171 - DNA, 22 bp, Artificial Sequence
  Target HLA Sequence complement
actcaccacgctgtctctgacc

SEQ ID NO: 11172 - DNA, 22 bp, Artificial Sequence
  Target HLA Sequence complement
ctcaccacgctgtctctgacca

SEQ ID NO: 11173 - DNA, 22 bp, Artificial Sequence
  Target HLA Sequence complement
tcaccacgctgtctctgaccat

SEQ ID NO: 11174 - DNA, 22 bp, Artificial Sequence
  Target HLA Sequence complement
caccacgctgtctctgaccatg

SEQ ID NO: 11175 - DNA, 22 bp, Artificial Sequence
  Target HLA Sequence complement
accacgctgtctctgaccatga

SEQ ID NO: 11176 - DNA, 22 bp, Artificial Sequence
  Target HLA Sequence complement
ccacgctgtctctgaccatgaa

SEQ ID NO: 11177 - DNA, 22 bp, Artificial Sequence
  Target HLA Sequence complement
cacgctgtctctgaccatgaag

SEQ ID NO: 11178 - DNA, 22 bp, Artificial Sequence
  Target HLA Sequence complement
acgctgtctctgaccatgaagc

SEQ ID NO: 11179 - DNA, 22 bp, Artificial Sequence
  Target HLA Sequence complement
cgctgtctctgaccatgaagcc

SEQ ID NO: 11180 - DNA, 22 bp, Artificial Sequence
  Target HLA Sequence complement
gctgtctctgaccatgaagcca

SEQ ID NO: 11181 - DNA, 22 bp, Artificial Sequence
  Target HLA Sequence complement
ctgtctctgaccatgaagccac

SEQ ID NO: 11182 - DNA, 22 bp, Artificial Sequence
  Target HLA Sequence complement
tgtctctgaccatgaagccacc

SEQ ID NO: 11183 - DNA, 22 bp, Artificial Sequence
  Target HLA Sequence complement
gtctctgaccatgaagccaccc

SEQ ID NO: 11184 - DNA, 22 bp, Artificial Sequence
  Target HLA Sequence complement
tctctgaccatgaagccaccct

SEQ ID NO: 11185 - DNA, 22 bp, Artificial Sequence
  Target HLA Sequence complement
ctctgaccatgaagccaccctg

SEQ ID NO: 11186 - DNA, 22 bp, Artificial Sequence
  Target HLA Sequence complement
tctgaccatgaagccaccctga

SEQ ID NO: 11187 - DNA, 22 bp, Artificial Sequence
  Target HLA Sequence complement
ctgaccatgaagccaccctgag

SEQ ID NO: 11188 - DNA, 22 bp, Artificial Sequence
  Target HLA Sequence complement
tgaccatgaagccaccctgagg

SEQ ID NO: 11189 - DNA, 22 bp, Artificial Sequence
  Target HLA Sequence complement
gaccatgaagccaccctgaggt

SEQ ID NO: 11190 - DNA, 22 bp, Artificial Sequence
  Target HLA Sequence complement
accatgaagccaccctgaggtg

SEQ ID NO: 11191 - DNA, 22 bp, Artificial Sequence
  Target HLA Sequence complement
catgaagccaccctgaggtgct

SEQ ID NO: 11192 - DNA, 22 bp, Artificial Sequence
  Target HLA Sequence complement
atgaagccaccctgaggtgctg

SEQ ID NO: 11193 - DNA, 22 bp, Artificial Sequence
  Target HLA Sequence complement
ctgagcttctaccctgcggaga

SEQ ID NO: 11194 - DNA, 22 bp, Artificial Sequence
  Target HLA Sequence complement
tgagcttctaccctgcggagat

SEQ ID NO: 11195 - DNA, 22 bp, Artificial Sequence
  Target HLA Sequence complement
gagcttctaccctgcggagatc

SEQ ID NO: 11196 - DNA, 22 bp, Artificial Sequence
  Target HLA Sequence complement
agcttctaccctgcggagatca

SEQ ID NO: 11197 - DNA, 22 bp, Artificial Sequence
  Target HLA Sequence complement
gcttctaccctgcggagatcac

SEQ ID NO: 11198 - DNA, 22 bp, Artificial Sequence
  Target HLA Sequence complement
cttctaccctgcggagatcaca

SEQ ID NO: 11199 - DNA, 22 bp, Artificial Sequence
  Target HLA Sequence complement
ttctaccctgcggagatcacac

SEQ ID NO: 11200 - DNA, 22 bp, Artificial Sequence
  Target HLA Sequence complement
tctaccctgcggagatcacact

SEQ ID NO: 11201 - DNA, 22 bp, Artificial Sequence
  Target HLA Sequence complement
ctaccctgcggagatcacactg

SEQ ID NO: 11202 - DNA, 22 bp, Artificial Sequence
  Target HLA Sequence complement
taccctgcggagatcacactga

SEQ ID NO: 11203 - DNA, 22 bp, Artificial Sequence
  Target HLA Sequence complement
accctgcggagatcacactgac

SEQ ID NO: 11204 - DNA, 22 bp, Artificial Sequence
  Target HLA Sequence complement
cctgcggagatcacactgacct

SEQ ID NO: 11205 - DNA, 22 bp, Artificial Sequence
  Target HLA Sequence complement
ctgcggagatcacactgacctg

SEQ ID NO: 11206 - DNA, 22 bp, Artificial Sequence
  Target HLA Sequence complement
tgcggagatcacactgacctgg

SEQ ID NO: 11207 - DNA, 22 bp, Artificial Sequence
  Target HLA Sequence complement
cggagatcacactgacctggca

SEQ ID NO: 11208 - DNA, 22 bp, Artificial Sequence
  Target HLA Sequence complement
ggagatcacactgacctggcag

SEQ ID NO: 11209 - DNA, 22 bp, Artificial Sequence
  Target HLA Sequence complement
gagatcacactgacctggcagc

SEQ ID NO: 11210 - DNA, 22 bp, Artificial Sequence
  Target HLA Sequence complement
agatcacactgacctggcagcg

SEQ ID NO: 11211 - DNA, 22 bp, Artificial Sequence
  Target HLA Sequence complement
gggatggaaccttccagaagtg

SEQ ID NO: 11212 - DNA, 22 bp, Artificial Sequence
  Target HLA Sequence complement
ggatggaaccttccagaagtgg

SEQ ID NO: 11213 - DNA, 22 bp, Artificial Sequence
  Target HLA Sequence complement
gatggaaccttccagaagtggg

SEQ ID NO: 11214 - DNA, 22 bp, Artificial Sequence
  Target HLA Sequence complement
atggaaccttccagaagtgggc

SEQ ID NO: 11215 - DNA, 22 bp, Artificial Sequence
  Target HLA Sequence complement
tggaaccttccagaagtgggcg

SEQ ID NO: 11216 - DNA, 22 bp, Artificial Sequence
  Target HLA Sequence complement
ctgtggtggtgccttctggaca

SEQ ID NO: 11217 - DNA, 22 bp, Artificial Sequence
  Target HLA Sequence complement
tgtggtggtgccttctggacag

SEQ ID NO: 11218 - DNA, 22 bp, Artificial Sequence
  Target HLA Sequence complement
tggtggtgccttctggacagga

SEQ ID NO: 11219 - DNA, 22 bp, Artificial Sequence
  Target HLA Sequence complement
tggtgccttctggacaggagca

SEQ ID NO: 11220 - DNA, 22 bp, Artificial Sequence
  Target HLA Sequence complement
gtgccttctggacaggagcaga

SEQ ID NO: 11221 - DNA, 22 bp, Artificial Sequence
  Target HLA Sequence complement
tgccttctggacaggagcagag

SEQ ID NO: 11222 - DNA, 22 bp, Artificial Sequence
  Target HLA Sequence complement
gccttctggacaggagcagaga

SEQ ID NO: 11223 - DNA, 22 bp, Artificial Sequence
  Target HLA Sequence complement
ccttctggacaggagcagagat

SEQ ID NO: 11224 - DNA, 22 bp, Artificial Sequence
  Target HLA Sequence complement
cttctggacaggagcagagata

SEQ ID NO: 11225 - DNA, 22 bp, Artificial Sequence
  Target HLA Sequence complement
ttctggacaggagcagagatac

SEQ ID NO: 11226 - DNA, 22 bp, Artificial Sequence
  Target HLA Sequence complement
tctggacaggagcagagataca

SEQ ID NO: 11227 - DNA, 22 bp, Artificial Sequence
  Target HLA Sequence complement
ctggacaggagcagagatacac

SEQ ID NO: 11228 - DNA, 22 bp, Artificial Sequence
  Target HLA Sequence complement
tggacaggagcagagatacacc

SEQ ID NO: 11229 - DNA, 22 bp, Artificial Sequence
  Target HLA Sequence complement
ggacaggagcagagatacacct

SEQ ID NO: 11230 - DNA, 22 bp, Artificial Sequence
  Target HLA Sequence complement
gacaggagcagagatacacctg

SEQ ID NO: 11231 - DNA, 22 bp, Artificial Sequence
  Target HLA Sequence complement
acaggagcagagatacacctgc

SEQ ID NO: 11232 - DNA, 22 bp, Artificial Sequence
  Target HLA Sequence complement
caggagcagagatacacctgcc

SEQ ID NO: 11233 - DNA, 22 bp, Artificial Sequence
  Target HLA Sequence complement
aggagcagagatacacctgcca

SEQ ID NO: 11234 - DNA, 22 bp, Artificial Sequence
  Target HLA Sequence complement
ggagcagagatacacctgccat

SEQ ID NO: 11235 - DNA, 22 bp, Artificial Sequence
  Target HLA Sequence complement
gagcagagatacacctgccatg

SEQ ID NO: 11236 - DNA, 22 bp, Artificial Sequence
  Target HLA Sequence complement
agcagagatacacctgccatgt

SEQ ID NO: 11237 - DNA, 22 bp, Artificial Sequence
  Target HLA Sequence complement
gcagagatacacctgccatgtg

SEQ ID NO: 11238 - DNA, 22 bp, Artificial Sequence
  Target HLA Sequence complement
cagagatacacctgccatgtgc

SEQ ID NO: 11239 - DNA, 22 bp, Artificial Sequence
  Target HLA Sequence complement
agagatacacctgccatgtgca

SEQ ID NO: 11240 - DNA, 22 bp, Artificial Sequence
  Target HLA Sequence complement
gagatacacctgccatgtgcag

SEQ ID NO: 11241 - DNA, 22 bp, Artificial Sequence
  Target HLA Sequence complement
agatacacctgccatgtgcagc

SEQ ID NO: 11242 - DNA, 22 bp, Artificial Sequence
  Target HLA Sequence complement
gatacacctgccatgtgcagca

SEQ ID NO: 11243 - DNA, 22 bp, Artificial Sequence
  Target HLA Sequence complement
atacacctgccatgtgcagcat

SEQ ID NO: 11244 - DNA, 22 bp, Artificial Sequence
  Target HLA Sequence complement
tacacctgccatgtgcagcatg

SEQ ID NO: 11245 - DNA, 22 bp, Artificial Sequence
  Target HLA Sequence complement
acacctgccatgtgcagcatga

SEQ ID NO: 11246 - DNA, 22 bp, Artificial Sequence
  Target HLA Sequence complement
cacctgccatgtgcagcatgag

SEQ ID NO: 11247 - DNA, 22 bp, Artificial Sequence
  Target HLA Sequence complement
acctgccatgtgcagcatgagg

SEQ ID NO: 11248 - DNA, 22 bp, Artificial Sequence
  Target HLA Sequence complement
ctgccatgtgcagcatgagggt

SEQ ID NO: 11249 - DNA, 22 bp, Artificial Sequence
  Target HLA Sequence complement
tgccatgtgcagcatgagggtt

SEQ ID NO: 11250 - DNA, 22 bp, Artificial Sequence
  Target HLA Sequence complement
gccatgtgcagcatgagggttt

SEQ ID NO: 11251 - DNA, 22 bp, Artificial Sequence
  Target HLA Sequence complement
ccatgtgcagcatgagggtttg

SEQ ID NO: 11252 - DNA, 22 bp, Artificial Sequence
  Target HLA Sequence complement
catgtgcagcatgagggtttgc

SEQ ID NO: 11253 - DNA, 22 bp, Artificial Sequence
  Target HLA Sequence complement
atgtgcagcatgagggtttgcc

SEQ ID NO: 11254 - DNA, 22 bp, Artificial Sequence
  Target HLA Sequence complement
tgtgcagcatgagggtttgccc

SEQ ID NO: 11255 - DNA, 22 bp, Artificial Sequence
  Target HLA Sequence complement
gtgcagcatgagggtttgccca

SEQ ID NO: 11256 - DNA, 22 bp, Artificial Sequence
  Target HLA Sequence complement
tgcagcatgagggtttgcccaa

SEQ ID NO: 11257 - DNA, 22 bp, Artificial Sequence
  Target HLA Sequence complement
gcagcatgagggtttgcccaag

SEQ ID NO: 11258 - DNA, 22 bp, Artificial Sequence
  Target HLA Sequence complement
cagcatgagggtttgcccaagc

SEQ ID NO: 11259 - DNA, 22 bp, Artificial Sequence
  Target HLA Sequence complement
agcatgagggtttgcccaagcc

SEQ ID NO: 11260 - DNA, 22 bp, Artificial Sequence
  Target HLA Sequence complement
accctgagatgggagccgtctt

SEQ ID NO: 11261 - DNA, 22 bp, Artificial Sequence
  Target HLA Sequence complement
tgagatgggagccgtcttccca

SEQ ID NO: 11262 - DNA, 22 bp, Artificial Sequence
  Target HLA Sequence complement
cccatcgtgggcatcattgctg

SEQ ID NO: 11263 - DNA, 22 bp, Artificial Sequence
  Target HLA Sequence complement
ccatcgtgggcatcattgctgg

SEQ ID NO: 11264 - DNA, 22 bp, Artificial Sequence
  Target HLA Sequence complement
catcgtgggcatcattgctggc

SEQ ID NO: 11265 - DNA, 22 bp, Artificial Sequence
  Target HLA Sequence complement
atcgtgggcatcattgctggcc

SEQ ID NO: 11266 - DNA, 22 bp, Artificial Sequence
  Target HLA Sequence complement
tcgtgggcatcattgctggcct

SEQ ID NO: 11267 - DNA, 22 bp, Artificial Sequence
  Target HLA Sequence complement
tgggcatcattgctggcctggt

SEQ ID NO: 11268 - DNA, 22 bp, Artificial Sequence
  Target HLA Sequence complement
gggcatcattgctggcctggtt

SEQ ID NO: 11269 - DNA, 22 bp, Artificial Sequence
  Target HLA Sequence complement
ggcatcattgctggcctggttc

SEQ ID NO: 11270 - DNA, 22 bp, Artificial Sequence
  Target HLA Sequence complement
gcatcattgctggcctggttct

SEQ ID NO: 11271 - DNA, 22 bp, Artificial Sequence
  Target HLA Sequence complement
catcattgctggcctggttctc

SEQ ID NO: 11272 - DNA, 22 bp, Artificial Sequence
  Target HLA Sequence complement
atcattgctggcctggttctct

SEQ ID NO: 11273 - DNA, 22 bp, Artificial Sequence
  Target HLA Sequence complement
tcattgctggcctggttctctt

SEQ ID NO: 11274 - DNA, 22 bp, Artificial Sequence
  Target HLA Sequence complement
cattgctggcctggttctcttt

SEQ ID NO: 11275 - DNA, 22 bp, Artificial Sequence
  Target HLA Sequence complement
attgctggcctggttctctttg

SEQ ID NO: 11276 - DNA, 22 bp, Artificial Sequence
  Target HLA Sequence complement
ttgctggcctggttctctttgg

SEQ ID NO: 11277 - DNA, 22 bp, Artificial Sequence
  Target HLA Sequence complement
tgctggcctggttctctttgga

SEQ ID NO: 11278 - DNA, 22 bp, Artificial Sequence
  Target HLA Sequence complement
gctggcctggttctctttggag

SEQ ID NO: 11279 - DNA, 22 bp, Artificial Sequence
  Target HLA Sequence complement
ctggcctggttctctttggagc

SEQ ID NO: 11280 - DNA, 22 bp, Artificial Sequence
  Target HLA Sequence complement
tggcctggttctctttggagct

SEQ ID NO: 11281 - DNA, 22 bp, Artificial Sequence
  Target HLA Sequence complement
ggcctggttctctttggagctg

SEQ ID NO: 11282 - DNA, 22 bp, Artificial Sequence
  Target HLA Sequence complement
gcctggttctctttggagctgt

SEQ ID NO: 11283 - DNA, 22 bp, Artificial Sequence
  Target HLA Sequence complement
cctggttctctttggagctgtg

SEQ ID NO: 11284 - DNA, 22 bp, Artificial Sequence
  Target HLA Sequence complement
ctggttctctttggagctgtga

SEQ ID NO: 11285 - DNA, 22 bp, Artificial Sequence
  Target HLA Sequence complement
tggttctctttggagctgtgat

SEQ ID NO: 11286 - DNA, 22 bp, Artificial Sequence
  Target HLA Sequence complement
ggttctctttggagctgtgatc

SEQ ID NO: 11287 - DNA, 22 bp, Artificial Sequence
  Target HLA Sequence complement
gttctctttggagctgtgatca

SEQ ID NO: 11288 - DNA, 22 bp, Artificial Sequence
  Target HLA Sequence complement
ttctctttggagctgtgatcac

SEQ ID NO: 11289 - DNA, 22 bp, Artificial Sequence
  Target HLA Sequence complement
tctctttggagctgtgatcact

SEQ ID NO: 11290 - DNA, 22 bp, Artificial Sequence
  Target HLA Sequence complement
ctctttggagctgtgatcactg

SEQ ID NO: 11291 - DNA, 22 bp, Artificial Sequence
  Target HLA Sequence complement
tctttggagctgtgatcactgg

SEQ ID NO: 11292 - DNA, 22 bp, Artificial Sequence
  Target HLA Sequence complement
ctttggagctgtgatcactgga

SEQ ID NO: 11293 - DNA, 22 bp, Artificial Sequence
  Target HLA Sequence complement
tttggagctgtgatcactggag

SEQ ID NO: 11294 - DNA, 22 bp, Artificial Sequence
  Target HLA Sequence complement
ttggagctgtgatcactggagc

SEQ ID NO: 11295 - DNA, 22 bp, Artificial Sequence
  Target HLA Sequence complement
tggagctgtgatcactggagct

SEQ ID NO: 11296 - DNA, 22 bp, Artificial Sequence
  Target HLA Sequence complement
ggagctgtgatcactggagctg

SEQ ID NO: 11297 - DNA, 22 bp, Artificial Sequence
  Target HLA Sequence complement
gagctgtgatcactggagctgt

SEQ ID NO: 11298 - DNA, 22 bp, Artificial Sequence
  Target HLA Sequence complement
agctgtgatcactggagctgtg

SEQ ID NO: 11299 - DNA, 22 bp, Artificial Sequence
  Target HLA Sequence complement
gctgtgatcactggagctgtgg

SEQ ID NO: 11300 - DNA, 22 bp, Artificial Sequence
  Target HLA Sequence complement
ctgtgatcactggagctgtggt

SEQ ID NO: 11301 - DNA, 22 bp, Artificial Sequence
  Target HLA Sequence complement
tgtgatcactggagctgtggtc

SEQ ID NO: 11302 - DNA, 22 bp, Artificial Sequence
  Target HLA Sequence complement
gtgatcactggagctgtggtcg

SEQ ID NO: 11303 - DNA, 22 bp, Artificial Sequence
  Target HLA Sequence complement
tgatcactggagctgtggtcgc

SEQ ID NO: 11304 - DNA, 22 bp, Artificial Sequence
  Target HLA Sequence complement
gatcactggagctgtggtcgct

SEQ ID NO: 11305 - DNA, 22 bp, Artificial Sequence
  Target HLA Sequence complement
atcactggagctgtggtcgctg

SEQ ID NO: 11306 - DNA, 22 bp, Artificial Sequence
  Target HLA Sequence complement
gagctgtggtcgctgctgtgat

SEQ ID NO: 11307 - DNA, 22 bp, Artificial Sequence
  Target HLA Sequence complement
agctgtggtcgctgctgtgatg

SEQ ID NO: 11308 - DNA, 22 bp, Artificial Sequence
  Target HLA Sequence complement
gctgtggtcgctgctgtgatgt

SEQ ID NO: 11309 - DNA, 22 bp, Artificial Sequence
  Target HLA Sequence complement
ctgtggtcgctgctgtgatgtg

SEQ ID NO: 11310 - DNA, 22 bp, Artificial Sequence
  Target HLA Sequence complement
tgtggtcgctgctgtgatgtgg

SEQ ID NO: 11311 - DNA, 22 bp, Artificial Sequence
  Target HLA Sequence complement
gtggtcgctgctgtgatgtgga

SEQ ID NO: 11312 - DNA, 22 bp, Artificial Sequence
  Target HLA Sequence complement
tggtcgctgctgtgatgtggag

SEQ ID NO: 11313 - DNA, 22 bp, Artificial Sequence
  Target HLA Sequence complement
gtcgctgctgtgatgtggagga

SEQ ID NO: 11314 - DNA, 22 bp, Artificial Sequence
  Target HLA Sequence complement
tcgctgctgtgatgtggaggag

SEQ ID NO: 11315 - DNA, 22 bp, Artificial Sequence
  Target HLA Sequence complement
gctgctgtgatgtggaggagga

SEQ ID NO: 11316 - DNA, 22 bp, Artificial Sequence
  Target HLA Sequence complement
ctgctgtgatgtggaggaggaa

SEQ ID NO: 11317 - DNA, 22 bp, Artificial Sequence
  Target HLA Sequence complement
tgctgtgatgtggaggaggaag

SEQ ID NO: 11318 - DNA, 22 bp, Artificial Sequence
  Target HLA Sequence complement
gctgtgatgtggaggaggaaga

SEQ ID NO: 11319 - DNA, 22 bp, Artificial Sequence
  Target HLA Sequence complement
ctgtgatgtggaggaggaagag

SEQ ID NO: 11320 - DNA, 22 bp, Artificial Sequence
  Target HLA Sequence complement
tgtgatgtggaggaggaagagc

SEQ ID NO: 11321 - DNA, 22 bp, Artificial Sequence
  Target HLA Sequence complement
gtgatgtggaggaggaagagct

SEQ ID NO: 11322 - DNA, 22 bp, Artificial Sequence
  Target HLA Sequence complement
tgatgtggaggaggaagagctc

SEQ ID NO: 11323 - DNA, 22 bp, Artificial Sequence
  Target HLA Sequence complement
gatgtggaggaggaagagctca

SEQ ID NO: 11324 - DNA, 22 bp, Artificial Sequence
  Target HLA Sequence complement
atgtggaggaggaagagctcag

SEQ ID NO: 11325 - DNA, 22 bp, Artificial Sequence
  Target HLA Sequence complement
tgtggaggaggaagagctcaga

SEQ ID NO: 11326 - DNA, 22 bp, Artificial Sequence
  Target HLA Sequence complement
gtggaggaggaagagctcagat

SEQ ID NO: 11327 - DNA, 22 bp, Artificial Sequence
  Target HLA Sequence complement
tggaggaggaagagctcagata

SEQ ID NO: 11328 - DNA, 22 bp, Artificial Sequence
  Target HLA Sequence complement
ggaggaggaagagctcagatag

SEQ ID NO: 11329 - DNA, 22 bp, Artificial Sequence
  Target HLA Sequence complement
gaggaggaagagctcagataga

SEQ ID NO: 11330 - DNA, 22 bp, Artificial Sequence
  Target HLA Sequence complement
aggaggaagagctcagatagaa

SEQ ID NO: 11331 - DNA, 22 bp, Artificial Sequence
  Target HLA Sequence complement
ggaggaagagctcagatagaaa

SEQ ID NO: 11332 - DNA, 22 bp, Artificial Sequence
  Target HLA Sequence complement
aaaggagggagctactctcagg

SEQ ID NO: 11333 - DNA, 22 bp, Artificial Sequence
  Target HLA Sequence complement
aaggagggagctactctcaggc

SEQ ID NO: 11334 - DNA, 22 bp, Artificial Sequence
  Target HLA Sequence complement
aggagggagctactctcaggct

SEQ ID NO: 11335 - DNA, 22 bp, Artificial Sequence
  Target HLA Sequence complement
agggagctactctcaggctgca

SEQ ID NO: 11336 - DNA, 22 bp, Artificial Sequence
  Target HLA Sequence complement
gggagctactctcaggctgcaa

SEQ ID NO: 11337 - DNA, 22 bp, Artificial Sequence
  Target HLA Sequence complement
ggagctactctcaggctgcaag

SEQ ID NO: 11338 - DNA, 22 bp, Artificial Sequence
  Target HLA Sequence complement
gagctactctcaggctgcaagc

SEQ ID NO: 11339 - DNA, 22 bp, Artificial Sequence
  Target HLA Sequence complement
agctactctcaggctgcaagca

SEQ ID NO: 11340 - DNA, 22 bp, Artificial Sequence
  Target HLA Sequence complement
gctactctcaggctgcaagcag

SEQ ID NO: 11341 - DNA, 22 bp, Artificial Sequence
  Target HLA Sequence complement
ctactctcaggctgcaagcagt

SEQ ID NO: 11342 - DNA, 22 bp, Artificial Sequence
  Target HLA Sequence complement
tactctcaggctgcaagcagtg

SEQ ID NO: 11343 - DNA, 22 bp, Artificial Sequence
  Target HLA Sequence complement
actctcaggctgcaagcagtga

SEQ ID NO: 11344 - DNA, 22 bp, Artificial Sequence
  Target HLA Sequence complement
ctctcaggctgcaagcagtgac

SEQ ID NO: 11345 - DNA, 22 bp, Artificial Sequence
  Target HLA Sequence complement
tctcaggctgcaagcagtgaca

SEQ ID NO: 11346 - DNA, 22 bp, Artificial Sequence
  Target HLA Sequence complement
ctcaggctgcaagcagtgacag

SEQ ID NO: 11347 - DNA, 22 bp, Artificial Sequence
  Target HLA Sequence complement
tcaggctgcaagcagtgacagt

SEQ ID NO: 11348 - DNA, 22 bp, Artificial Sequence
  Target HLA Sequence complement
caggctgcaagcagtgacagtg

SEQ ID NO: 11349 - DNA, 22 bp, Artificial Sequence
  Target HLA Sequence complement
aggctgcaagcagtgacagtgc

SEQ ID NO: 11350 - DNA, 22 bp, Artificial Sequence
  Target HLA Sequence complement
ctgcaagcagtgacagtgccca

SEQ ID NO: 11351 - DNA, 22 bp, Artificial Sequence
  Target HLA Sequence complement
tgcaagcagtgacagtgcccag

SEQ ID NO: 11352 - DNA, 22 bp, Artificial Sequence
  Target HLA Sequence complement
tgacagtgcccagggctctgat

SEQ ID NO: 11353 - DNA, 22 bp, Artificial Sequence
  Target HLA Sequence complement
acagtgcccagggctctgatgt

SEQ ID NO: 11354 - DNA, 22 bp, Artificial Sequence
  Target HLA Sequence complement
agtgcccagggctctgatgtgt

SEQ ID NO: 11355 - DNA, 22 bp, Artificial Sequence
  Target HLA Sequence complement
tgcccagggctctgatgtgtct

SEQ ID NO: 11356 - DNA, 22 bp, Artificial Sequence
  Target HLA Sequence complement
cccagggctctgatgtgtctct

SEQ ID NO: 11357 - DNA, 22 bp, Artificial Sequence
  Target HLA Sequence complement
ccagggctctgatgtgtctctc

SEQ ID NO: 11358 - DNA, 22 bp, Artificial Sequence
  Target HLA Sequence complement
cagggctctgatgtgtctctca

SEQ ID NO: 11359 - DNA, 22 bp, Artificial Sequence
  Target HLA Sequence complement
agggctctgatgtgtctctcac

SEQ ID NO: 11360 - DNA, 22 bp, Artificial Sequence
  Target HLA Sequence complement
gggctctgatgtgtctctcaca

SEQ ID NO: 11361 - DNA, 22 bp, Artificial Sequence
  Target HLA Sequence complement
ggctctgatgtgtctctcacag

SEQ ID NO: 11362 - DNA, 22 bp, Artificial Sequence
  Target HLA Sequence complement
gctctgatgtgtctctcacagc

SEQ ID NO: 11363 - DNA, 22 bp, Artificial Sequence
  Target HLA Sequence complement
ctctgatgtgtctctcacagct

SEQ ID NO: 11364 - DNA, 22 bp, Artificial Sequence
  Target HLA Sequence complement
tctgatgtgtctctcacagctt

SEQ ID NO: 11365 - DNA, 22 bp, Artificial Sequence
  Target HLA Sequence complement
ctgatgtgtctctcacagcttg

SEQ ID NO: 11366 - DNA, 22 bp, Artificial Sequence
  Target HLA Sequence complement
tgatgtgtctctcacagcttgt

SEQ ID NO: 11367 - DNA, 22 bp, Artificial Sequence
  Target HLA Sequence complement
gatgtgtctctcacagcttgta

SEQ ID NO: 11368 - DNA, 22 bp, Artificial Sequence
  Target HLA Sequence complement
atgtgtctctcacagcttgtaa

SEQ ID NO: 11369 - DNA, 22 bp, Artificial Sequence
  Target HLA Sequence complement
tgtgtctctcacagcttgtaaa

SEQ ID NO: 11370 - DNA, 22 bp, Artificial Sequence
  Target HLA Sequence complement
gtgtctctcacagcttgtaaag

SEQ ID NO: 11371 - DNA, 22 bp, Artificial Sequence
  Target HLA Sequence complement
tgtctctcacagcttgtaaagt

SEQ ID NO: 11372 - DNA, 22 bp, Artificial Sequence
  Target HLA Sequence complement
gtctctcacagcttgtaaagtg

SEQ ID NO: 11373 - DNA, 22 bp, Artificial Sequence
  Target HLA Sequence complement
tctctcacagcttgtaaagtgt

SEQ ID NO: 11374 - DNA, 22 bp, Artificial Sequence
  Target HLA Sequence complement
ctctcacagcttgtaaagtgtg

SEQ ID NO: 11375 - DNA, 22 bp, Artificial Sequence
  Target HLA Sequence complement
tctcacagcttgtaaagtgtga

SEQ ID NO: 11376 - DNA, 22 bp, Artificial Sequence
  Target HLA Sequence complement
ctcacagcttgtaaagtgtgag

SEQ ID NO: 11377 - DNA, 22 bp, Artificial Sequence
  Target HLA Sequence complement
tcacagcttgtaaagtgtgaga

SEQ ID NO: 11378 - DNA, 22 bp, Artificial Sequence
  Target HLA Sequence complement
cacagcttgtaaagtgtgagac

SEQ ID NO: 11379 - DNA, 22 bp, Artificial Sequence
  Target HLA Sequence complement
acagcttgtaaagtgtgagaca

SEQ ID NO: 11380 - DNA, 22 bp, Artificial Sequence
  Target HLA Sequence complement
cagcttgtaaagtgtgagacag

SEQ ID NO: 11381 - DNA, 22 bp, Artificial Sequence
  Target HLA Sequence complement
agcttgtaaagtgtgagacagc

SEQ ID NO: 11382 - DNA, 22 bp, Artificial Sequence
  Target HLA Sequence complement
gcttgtaaagtgtgagacagct

SEQ ID NO: 11383 - DNA, 22 bp, Artificial Sequence
  Target HLA Sequence complement
cttgtaaagtgtgagacagctg

SEQ ID NO: 11384 - DNA, 22 bp, Artificial Sequence
  Target HLA Sequence complement
ttgtaaagtgtgagacagctgc

SEQ ID NO: 11385 - DNA, 22 bp, Artificial Sequence
  Target HLA Sequence complement
tgtaaagtgtgagacagctgcc

SEQ ID NO: 11386 - DNA, 22 bp, Artificial Sequence
  Target HLA Sequence complement
gtaaagtgtgagacagctgcct

SEQ ID NO: 11387 - DNA, 22 bp, Artificial Sequence
  Target HLA Sequence complement
taaagtgtgagacagctgcctt

SEQ ID NO: 11388 - DNA, 22 bp, Artificial Sequence
  Target HLA Sequence complement
aaagtgtgagacagctgccttg

SEQ ID NO: 11389 - DNA, 22 bp, Artificial Sequence
  Target HLA Sequence complement
aagtgtgagacagctgccttgt

SEQ ID NO: 11390 - DNA, 22 bp, Artificial Sequence
  Target HLA Sequence complement
agtgtgagacagctgccttgtg

SEQ ID NO: 11391 - DNA, 22 bp, Artificial Sequence
  Target HLA Sequence complement
gtgtgagacagctgccttgtgt

SEQ ID NO: 11392 - DNA, 22 bp, Artificial Sequence
  Target HLA Sequence complement
tgtgagacagctgccttgtgtg

SEQ ID NO: 11393 - DNA, 22 bp, Artificial Sequence
  Target HLA Sequence complement
gtgagacagctgccttgtgtgg

SEQ ID NO: 11394 - DNA, 22 bp, Artificial Sequence
  Target HLA Sequence complement
tgagacagctgccttgtgtggg

SEQ ID NO: 11395 - DNA, 22 bp, Artificial Sequence
  Target HLA Sequence complement
gagacagctgccttgtgtggga

SEQ ID NO: 11396 - DNA, 22 bp, Artificial Sequence
  Target HLA Sequence complement
agacagctgccttgtgtgggac

SEQ ID NO: 11397 - DNA, 22 bp, Artificial Sequence
  Target HLA Sequence complement
gacagctgccttgtgtgggact

SEQ ID NO: 11398 - DNA, 22 bp, Artificial Sequence
  Target HLA Sequence complement
acagctgccttgtgtgggactg

SEQ ID NO: 11399 - DNA, 22 bp, Artificial Sequence
  Target HLA Sequence complement
cagctgccttgtgtgggactga

SEQ ID NO: 11400 - DNA, 22 bp, Artificial Sequence
  Target HLA Sequence complement
agctgccttgtgtgggactgag

SEQ ID NO: 11401 - DNA, 22 bp, Artificial Sequence
  Target HLA Sequence complement
gctgccttgtgtgggactgaga

SEQ ID NO: 11402 - DNA, 22 bp, Artificial Sequence
  Target HLA Sequence complement
ctgccttgtgtgggactgagag

SEQ ID NO: 11403 - DNA, 22 bp, Artificial Sequence
  Target HLA Sequence complement
tgccttgtgtgggactgagagg

SEQ ID NO: 11404 - DNA, 22 bp, Artificial Sequence
  Target HLA Sequence complement
ccttgtgtgggactgagaggca

SEQ ID NO: 11405 - DNA, 22 bp, Artificial Sequence
  Target HLA Sequence complement
cttgtgtgggactgagaggcaa

SEQ ID NO: 11406 - DNA, 22 bp, Artificial Sequence
  Target HLA Sequence complement
ttgtgtgggactgagaggcaag

SEQ ID NO: 11407 - DNA, 22 bp, Artificial Sequence
  Target HLA Sequence complement
tgtgtgggactgagaggcaaga

SEQ ID NO: 11408 - DNA, 22 bp, Artificial Sequence
  Target HLA Sequence complement
gtgtgggactgagaggcaagag

SEQ ID NO: 11409 - DNA, 22 bp, Artificial Sequence
  Target HLA Sequence complement
tgtgggactgagaggcaagagt

SEQ ID NO: 11410 - DNA, 22 bp, Artificial Sequence
  Target HLA Sequence complement
gtgggactgagaggcaagagtt

SEQ ID NO: 11411 - DNA, 22 bp, Artificial Sequence
  Target HLA Sequence complement
tgggactgagaggcaagagttg

SEQ ID NO: 11412 - DNA, 22 bp, Artificial Sequence
  Target HLA Sequence complement
gggactgagaggcaagagttgt

SEQ ID NO: 11413 - DNA, 22 bp, Artificial Sequence
  Target HLA Sequence complement
ggactgagaggcaagagttgtt

SEQ ID NO: 11414 - DNA, 22 bp, Artificial Sequence
  Target HLA Sequence complement
gactgagaggcaagagttgttc

SEQ ID NO: 11415 - DNA, 22 bp, Artificial Sequence
  Target HLA Sequence complement
actgagaggcaagagttgttcc

SEQ ID NO: 11416 - DNA, 22 bp, Artificial Sequence
  Target HLA Sequence complement
ctgagaggcaagagttgttcct

SEQ ID NO: 11417 - DNA, 22 bp, Artificial Sequence
  Target HLA Sequence complement
tgagaggcaagagttgttcctg

SEQ ID NO: 11418 - DNA, 22 bp, Artificial Sequence
  Target HLA Sequence complement
gagaggcaagagttgttcctgc

SEQ ID NO: 11419 - DNA, 22 bp, Artificial Sequence
  Target HLA Sequence complement
agaggcaagagttgttcctgcc

SEQ ID NO: 11420 - DNA, 22 bp, Artificial Sequence
  Target HLA Sequence complement
gaggcaagagttgttcctgccc

SEQ ID NO: 11421 - DNA, 22 bp, Artificial Sequence
  Target HLA Sequence complement
aggcaagagttgttcctgccct

SEQ ID NO: 11422 - DNA, 22 bp, Artificial Sequence
  Target HLA Sequence complement
ggcaagagttgttcctgccctt

SEQ ID NO: 11423 - DNA, 22 bp, Artificial Sequence
  Target HLA Sequence complement
gcaagagttgttcctgcccttc

SEQ ID NO: 11424 - DNA, 22 bp, Artificial Sequence
  Target HLA Sequence complement
caagagttgttcctgcccttcc

SEQ ID NO: 11425 - DNA, 22 bp, Artificial Sequence
  Target HLA Sequence complement
aagagttgttcctgcccttccc

SEQ ID NO: 11426 - DNA, 22 bp, Artificial Sequence
  Target HLA Sequence complement
agagttgttcctgcccttccct

SEQ ID NO: 11427 - DNA, 22 bp, Artificial Sequence
  Target HLA Sequence complement
gagttgttcctgcccttccctt

SEQ ID NO: 11428 - DNA, 22 bp, Artificial Sequence
  Target HLA Sequence complement
agttgttcctgcccttcccttt

SEQ ID NO: 11429 - DNA, 22 bp, Artificial Sequence
  Target HLA Sequence complement
gttgttcctgcccttccctttg

SEQ ID NO: 11430 - DNA, 22 bp, Artificial Sequence
  Target HLA Sequence complement
ttgttcctgcccttccctttgt

SEQ ID NO: 11431 - DNA, 22 bp, Artificial Sequence
  Target HLA Sequence complement
tgttcctgcccttccctttgtg

SEQ ID NO: 11432 - DNA, 22 bp, Artificial Sequence
  Target HLA Sequence complement
gttcctgcccttccctttgtga

SEQ ID NO: 11433 - DNA, 22 bp, Artificial Sequence
  Target HLA Sequence complement
ttcctgcccttccctttgtgac

SEQ ID NO: 11434 - DNA, 22 bp, Artificial Sequence
  Target HLA Sequence complement
tcctgcccttccctttgtgact

SEQ ID NO: 11435 - DNA, 22 bp, Artificial Sequence
  Target HLA Sequence complement
cctgcccttccctttgtgactt

SEQ ID NO: 11436 - DNA, 22 bp, Artificial Sequence
  Target HLA Sequence complement
ctgcccttccctttgtgacttg

SEQ ID NO: 11437 - DNA, 22 bp, Artificial Sequence
  Target HLA Sequence complement
tgcccttccctttgtgacttga

SEQ ID NO: 11438 - DNA, 22 bp, Artificial Sequence
  Target HLA Sequence complement
gcccttccctttgtgacttgaa

SEQ ID NO: 11439 - DNA, 22 bp, Artificial Sequence
  Target HLA Sequence complement
cccttccctttgtgacttgaag

SEQ ID NO: 11440 - DNA, 22 bp, Artificial Sequence
  Target HLA Sequence complement
ccttccctttgtgacttgaaga

SEQ ID NO: 11441 - DNA, 22 bp, Artificial Sequence
  Target HLA Sequence complement
cttccctttgtgacttgaagaa

SEQ ID NO: 11442 - DNA, 22 bp, Artificial Sequence
  Target HLA Sequence complement
ttccctttgtgacttgaagaac

SEQ ID NO: 11443 - DNA, 22 bp, Artificial Sequence
  Target HLA Sequence complement
tccctttgtgacttgaagaacc

SEQ ID NO: 11444 - DNA, 22 bp, Artificial Sequence
  Target HLA Sequence complement
ccctttgtgacttgaagaaccc

SEQ ID NO: 11445 - DNA, 22 bp, Artificial Sequence
  Target HLA Sequence complement
cctttgtgacttgaagaaccct

SEQ ID NO: 11446 - DNA, 22 bp, Artificial Sequence
  Target HLA Sequence complement
ctttgtgacttgaagaaccctg

SEQ ID NO: 11447 - DNA, 22 bp, Artificial Sequence
  Target HLA Sequence complement
tttgtgacttgaagaaccctga

SEQ ID NO: 11448 - DNA, 22 bp, Artificial Sequence
  Target HLA Sequence complement
ttgtgacttgaagaaccctgac

SEQ ID NO: 11449 - DNA, 22 bp, Artificial Sequence
  Target HLA Sequence complement
tgtgacttgaagaaccctgact

SEQ ID NO: 11450 - DNA, 22 bp, Artificial Sequence
  Target HLA Sequence complement
gtgacttgaagaaccctgactt

SEQ ID NO: 11451 - DNA, 22 bp, Artificial Sequence
  Target HLA Sequence complement
tgacttgaagaaccctgacttt

SEQ ID NO: 11452 - DNA, 22 bp, Artificial Sequence
  Target HLA Sequence complement
gacttgaagaaccctgactttg

SEQ ID NO: 11453 - DNA, 22 bp, Artificial Sequence
  Target HLA Sequence complement
acttgaagaaccctgactttgt

SEQ ID NO: 11454 - DNA, 22 bp, Artificial Sequence
  Target HLA Sequence complement
cttgaagaaccctgactttgtt

SEQ ID NO: 11455 - DNA, 22 bp, Artificial Sequence
  Target HLA Sequence complement
ttgaagaaccctgactttgttt

SEQ ID NO: 11456 - DNA, 22 bp, Artificial Sequence
  Target HLA Sequence complement
tgaagaaccctgactttgtttc

SEQ ID NO: 11457 - DNA, 22 bp, Artificial Sequence
  Target HLA Sequence complement
gaagaaccctgactttgtttct

SEQ ID NO: 11458 - DNA, 22 bp, Artificial Sequence
  Target HLA Sequence complement
aagaaccctgactttgtttctg

SEQ ID NO: 11459 - DNA, 22 bp, Artificial Sequence
  Target HLA Sequence complement
agaaccctgactttgtttctgc

SEQ ID NO: 11460 - DNA, 22 bp, Artificial Sequence
  Target HLA Sequence complement
gaaccctgactttgtttctgca

SEQ ID NO: 11461 - DNA, 22 bp, Artificial Sequence
  Target HLA Sequence complement
aaccctgactttgtttctgcaa

SEQ ID NO: 11462 - DNA, 22 bp, Artificial Sequence
  Target HLA Sequence complement
accctgactttgtttctgcaaa

SEQ ID NO: 11463 - DNA, 22 bp, Artificial Sequence
  Target HLA Sequence complement
ccctgactttgtttctgcaaag

SEQ ID NO: 11464 - DNA, 22 bp, Artificial Sequence
  Target HLA Sequence complement
cctgactttgtttctgcaaagg

SEQ ID NO: 11465 - DNA, 22 bp, Artificial Sequence
  Target HLA Sequence complement
ctgactttgtttctgcaaaggc

SEQ ID NO: 11466 - DNA, 22 bp, Artificial Sequence
  Target HLA Sequence complement
tgactttgtttctgcaaaggca

SEQ ID NO: 11467 - DNA, 22 bp, Artificial Sequence
  Target HLA Sequence complement
gactttgtttctgcaaaggcac

SEQ ID NO: 11468 - DNA, 22 bp, Artificial Sequence
  Target HLA Sequence complement
actttgtttctgcaaaggcacc

SEQ ID NO: 11469 - DNA, 22 bp, Artificial Sequence
  Target HLA Sequence complement
ctttgtttctgcaaaggcacct

SEQ ID NO: 11470 - DNA, 22 bp, Artificial Sequence
  Target HLA Sequence complement
tttgtttctgcaaaggcacctg

SEQ ID NO: 11471 - DNA, 22 bp, Artificial Sequence
  Target HLA Sequence complement
ttgtttctgcaaaggcacctgc

SEQ ID NO: 11472 - DNA, 22 bp, Artificial Sequence
  Target HLA Sequence complement
tgtttctgcaaaggcacctgca

SEQ ID NO: 11473 - DNA, 22 bp, Artificial Sequence
  Target HLA Sequence complement
gtttctgcaaaggcacctgcat

SEQ ID NO: 11474 - DNA, 22 bp, Artificial Sequence
  Target HLA Sequence complement
tttctgcaaaggcacctgcatg

SEQ ID NO: 11475 - DNA, 22 bp, Artificial Sequence
  Target HLA Sequence complement
ttctgcaaaggcacctgcatgt

SEQ ID NO: 11476 - DNA, 22 bp, Artificial Sequence
  Target HLA Sequence complement
tctgcaaaggcacctgcatgtg

SEQ ID NO: 11477 - DNA, 22 bp, Artificial Sequence
  Target HLA Sequence complement
ctgcaaaggcacctgcatgtgt

SEQ ID NO: 11478 - DNA, 22 bp, Artificial Sequence
  Target HLA Sequence complement
tgcaaaggcacctgcatgtgtc

SEQ ID NO: 11479 - DNA, 22 bp, Artificial Sequence
  Target HLA Sequence complement
gcaaaggcacctgcatgtgtct

SEQ ID NO: 11480 - DNA, 22 bp, Artificial Sequence
  Target HLA Sequence complement
caaaggcacctgcatgtgtctg

SEQ ID NO: 11481 - DNA, 22 bp, Artificial Sequence
  Target HLA Sequence complement
aaaggcacctgcatgtgtctgt

SEQ ID NO: 11482 - DNA, 22 bp, Artificial Sequence
  Target HLA Sequence complement
aaggcacctgcatgtgtctgtg

SEQ ID NO: 11483 - DNA, 22 bp, Artificial Sequence
  Target HLA Sequence complement
aggcacctgcatgtgtctgtgt

SEQ ID NO: 11484 - DNA, 22 bp, Artificial Sequence
  Target HLA Sequence complement
ggcacctgcatgtgtctgtgtt

SEQ ID NO: 11485 - DNA, 22 bp, Artificial Sequence
  Target HLA Sequence complement
gcacctgcatgtgtctgtgttc

SEQ ID NO: 11486 - DNA, 22 bp, Artificial Sequence
  Target HLA Sequence complement
cacctgcatgtgtctgtgttcg

SEQ ID NO: 11487 - DNA, 22 bp, Artificial Sequence
  Target HLA Sequence complement
acctgcatgtgtctgtgttcgt

SEQ ID NO: 11488 - DNA, 22 bp, Artificial Sequence
  Target HLA Sequence complement
cctgcatgtgtctgtgttcgtg

SEQ ID NO: 11489 - DNA, 22 bp, Artificial Sequence
  Target HLA Sequence complement
ctgcatgtgtctgtgttcgtgt

SEQ ID NO: 11490 - DNA, 22 bp, Artificial Sequence
  Target HLA Sequence complement
tgcatgtgtctgtgttcgtgta

SEQ ID NO: 11491 - DNA, 22 bp, Artificial Sequence
  Target HLA Sequence complement
gcatgtgtctgtgttcgtgtag

SEQ ID NO: 11492 - DNA, 22 bp, Artificial Sequence
  Target HLA Sequence complement
catgtgtctgtgttcgtgtagg

SEQ ID NO: 11493 - DNA, 22 bp, Artificial Sequence
  Target HLA Sequence complement
atgtgtctgtgttcgtgtaggc

SEQ ID NO: 11494 - DNA, 22 bp, Artificial Sequence
  Target HLA Sequence complement
tgtgtctgtgttcgtgtaggca

SEQ ID NO: 11495 - DNA, 22 bp, Artificial Sequence
  Target HLA Sequence complement
gtgtctgtgttcgtgtaggcat

SEQ ID NO: 11496 - DNA, 22 bp, Artificial Sequence
  Target HLA Sequence complement
tgtctgtgttcgtgtaggcata

SEQ ID NO: 11497 - DNA, 22 bp, Artificial Sequence
  Target HLA Sequence complement
gtctgtgttcgtgtaggcataa

SEQ ID NO: 11498 - DNA, 22 bp, Artificial Sequence
  Target HLA Sequence complement
tctgtgttcgtgtaggcataat

SEQ ID NO: 11499 - DNA, 22 bp, Artificial Sequence
  Target HLA Sequence complement
ctgtgttcgtgtaggcataatg

SEQ ID NO: 11500 - DNA, 22 bp, Artificial Sequence
  Target HLA Sequence complement
tgtgttcgtgtaggcataatgt

SEQ ID NO: 11501 - DNA, 22 bp, Artificial Sequence
  Target HLA Sequence complement
gtgttcgtgtaggcataatgtg

SEQ ID NO: 11502 - DNA, 22 bp, Artificial Sequence
  Target HLA Sequence complement
tgttcgtgtaggcataatgtga

SEQ ID NO: 11503 - DNA, 22 bp, Artificial Sequence
  Target HLA Sequence complement
gttcgtgtaggcataatgtgag

SEQ ID NO: 11504 - DNA, 22 bp, Artificial Sequence
  Target HLA Sequence complement
ttcgtgtaggcataatgtgagg

SEQ ID NO: 11505 - DNA, 22 bp, Artificial Sequence
  Target HLA Sequence complement
tcgtgtaggcataatgtgagga

SEQ ID NO: 11506 - DNA, 22 bp, Artificial Sequence
  Target HLA Sequence complement
cgtgtaggcataatgtgaggag

SEQ ID NO: 11507 - DNA, 22 bp, Artificial Sequence
  Target HLA Sequence complement
gtgtaggcataatgtgaggagg

SEQ ID NO: 11508 - DNA, 22 bp, Artificial Sequence
  Target HLA Sequence complement
tgtaggcataatgtgaggaggt

SEQ ID NO: 11509 - DNA, 22 bp, Artificial Sequence
  Target HLA Sequence complement
gtaggcataatgtgaggaggtg

SEQ ID NO: 11510 - DNA, 22 bp, Artificial Sequence
  Target HLA Sequence complement
taggcataatgtgaggaggtgg

SEQ ID NO: 11511 - DNA, 22 bp, Artificial Sequence
  Target HLA Sequence complement
aggcataatgtgaggaggtggg

SEQ ID NO: 11512 - DNA, 22 bp, Artificial Sequence
  Target HLA Sequence complement
cccatgtccaccatgaccctct

SEQ ID NO: 11513 - DNA, 22 bp, Artificial Sequence
  Target HLA Sequence complement
ccatgtccaccatgaccctctt

SEQ ID NO: 11514 - DNA, 22 bp, Artificial Sequence
  Target HLA Sequence complement
catgtccaccatgaccctcttc

SEQ ID NO: 11515 - DNA, 22 bp, Artificial Sequence
  Target HLA Sequence complement
atgtccaccatgaccctcttcc

SEQ ID NO: 11516 - DNA, 22 bp, Artificial Sequence
  Target HLA Sequence complement
tgtccaccatgaccctcttccc

SEQ ID NO: 11517 - DNA, 22 bp, Artificial Sequence
  Target HLA Sequence complement
gtccaccatgaccctcttccca

SEQ ID NO: 11518 - DNA, 22 bp, Artificial Sequence
  Target HLA Sequence complement
tccaccatgaccctcttcccac

SEQ ID NO: 11519 - DNA, 22 bp, Artificial Sequence
  Target HLA Sequence complement
accatgaccctcttcccacgct

SEQ ID NO: 11520 - DNA, 22 bp, Artificial Sequence
  Target HLA Sequence complement
catgaccctcttcccacgctga

SEQ ID NO: 11521 - DNA, 22 bp, Artificial Sequence
  Target HLA Sequence complement
atgaccctcttcccacgctgac

SEQ ID NO: 11522 - DNA, 22 bp, Artificial Sequence
  Target HLA Sequence complement
tcttcccacgctgacctgtgct

SEQ ID NO: 11523 - DNA, 22 bp, Artificial Sequence
  Target HLA Sequence complement
cccaatcatctttcctgttcca

SEQ ID NO: 11524 - DNA, 22 bp, Artificial Sequence
  Target HLA Sequence complement
ccaatcatctttcctgttccag

SEQ ID NO: 11525 - DNA, 22 bp, Artificial Sequence
  Target HLA Sequence complement
caatcatctttcctgttccaga

SEQ ID NO: 11526 - DNA, 22 bp, Artificial Sequence
  Target HLA Sequence complement
aatcatctttcctgttccagag

SEQ ID NO: 11527 - DNA, 22 bp, Artificial Sequence
  Target HLA Sequence complement
atcatctttcctgttccagaga

SEQ ID NO: 11528 - DNA, 22 bp, Artificial Sequence
  Target HLA Sequence complement
tcatctttcctgttccagagag

SEQ ID NO: 11529 - DNA, 22 bp, Artificial Sequence
  Target HLA Sequence complement
catctttcctgttccagagagg

SEQ ID NO: 11530 - DNA, 22 bp, Artificial Sequence
  Target HLA Sequence complement
atctttcctgttccagagaggt

SEQ ID NO: 11531 - DNA, 22 bp, Artificial Sequence
  Target HLA Sequence complement
tctttcctgttccagagaggtg

SEQ ID NO: 11532 - DNA, 22 bp, Artificial Sequence
  Target HLA Sequence complement
ctttcctgttccagagaggtgg

SEQ ID NO: 11533 - DNA, 22 bp, Artificial Sequence
  Target HLA Sequence complement
tttcctgttccagagaggtggg

SEQ ID NO: 11534 - DNA, 22 bp, Artificial Sequence
  Target HLA Sequence complement
gggctgaggtgtctccatctct

SEQ ID NO: 11535 - DNA, 22 bp, Artificial Sequence
  Target HLA Sequence complement
ggctgaggtgtctccatctctg

SEQ ID NO: 11536 - DNA, 22 bp, Artificial Sequence
  Target HLA Sequence complement
gctgaggtgtctccatctctgt

SEQ ID NO: 11537 - DNA, 22 bp, Artificial Sequence
  Target HLA Sequence complement
ctgaggtgtctccatctctgtc

SEQ ID NO: 11538 - DNA, 22 bp, Artificial Sequence
  Target HLA Sequence complement
tgaggtgtctccatctctgtct

SEQ ID NO: 11539 - DNA, 22 bp, Artificial Sequence
  Target HLA Sequence complement
gaggtgtctccatctctgtctc

SEQ ID NO: 11540 - DNA, 22 bp, Artificial Sequence
  Target HLA Sequence complement
aggtgtctccatctctgtctca

SEQ ID NO: 11541 - DNA, 22 bp, Artificial Sequence
  Target HLA Sequence complement
ggtgtctccatctctgtctcaa

SEQ ID NO: 11542 - DNA, 22 bp, Artificial Sequence
  Target HLA Sequence complement
gtgtctccatctctgtctcaac

SEQ ID NO: 11543 - DNA, 22 bp, Artificial Sequence
  Target HLA Sequence complement
tgtctccatctctgtctcaact

SEQ ID NO: 11544 - DNA, 22 bp, Artificial Sequence
  Target HLA Sequence complement
gtctccatctctgtctcaactt

SEQ ID NO: 11545 - DNA, 22 bp, Artificial Sequence
  Target HLA Sequence complement
tctccatctctgtctcaacttc

SEQ ID NO: 11546 - DNA, 22 bp, Artificial Sequence
  Target HLA Sequence complement
ctccatctctgtctcaacttca

SEQ ID NO: 11547 - DNA, 22 bp, Artificial Sequence
  Target HLA Sequence complement
tccatctctgtctcaacttcat

SEQ ID NO: 11548 - DNA, 22 bp, Artificial Sequence
  Target HLA Sequence complement
ccatctctgtctcaacttcatg

SEQ ID NO: 11549 - DNA, 22 bp, Artificial Sequence
  Target HLA Sequence complement
catctctgtctcaacttcatgg

SEQ ID NO: 11550 - DNA, 22 bp, Artificial Sequence
  Target HLA Sequence complement
atctctgtctcaacttcatggt

SEQ ID NO: 11551 - DNA, 22 bp, Artificial Sequence
  Target HLA Sequence complement
tctctgtctcaacttcatggtg

SEQ ID NO: 11552 - DNA, 22 bp, Artificial Sequence
  Target HLA Sequence complement
ctctgtctcaacttcatggtgc

SEQ ID NO: 11553 - DNA, 22 bp, Artificial Sequence
  Target HLA Sequence complement
tctgtctcaacttcatggtgca

SEQ ID NO: 11554 - DNA, 22 bp, Artificial Sequence
  Target HLA Sequence complement
ctgtctcaacttcatggtgcac

SEQ ID NO: 11555 - DNA, 22 bp, Artificial Sequence
  Target HLA Sequence complement
tgtctcaacttcatggtgcact

SEQ ID NO: 11556 - DNA, 22 bp, Artificial Sequence
  Target HLA Sequence complement
gtctcaacttcatggtgcactg

SEQ ID NO: 11557 - DNA, 22 bp, Artificial Sequence
  Target HLA Sequence complement
tctcaacttcatggtgcactga

SEQ ID NO: 11558 - DNA, 22 bp, Artificial Sequence
  Target HLA Sequence complement
ctcaacttcatggtgcactgag

SEQ ID NO: 11559 - DNA, 22 bp, Artificial Sequence
  Target HLA Sequence complement
tcaacttcatggtgcactgagc

SEQ ID NO: 11560 - DNA, 22 bp, Artificial Sequence
  Target HLA Sequence complement
caacttcatggtgcactgagct

SEQ ID NO: 11561 - DNA, 22 bp, Artificial Sequence
  Target HLA Sequence complement
aacttcatggtgcactgagctg

SEQ ID NO: 11562 - DNA, 22 bp, Artificial Sequence
  Target HLA Sequence complement
acttcatggtgcactgagctgt

SEQ ID NO: 11563 - DNA, 22 bp, Artificial Sequence
  Target HLA Sequence complement
cttcatggtgcactgagctgta

SEQ ID NO: 11564 - DNA, 22 bp, Artificial Sequence
  Target HLA Sequence complement
ttcatggtgcactgagctgtaa

SEQ ID NO: 11565 - DNA, 22 bp, Artificial Sequence
  Target HLA Sequence complement
tcatggtgcactgagctgtaac

SEQ ID NO: 11566 - DNA, 22 bp, Artificial Sequence
  Target HLA Sequence complement
catggtgcactgagctgtaact

SEQ ID NO: 11567 - DNA, 22 bp, Artificial Sequence
  Target HLA Sequence complement
atggtgcactgagctgtaactt

SEQ ID NO: 11568 - DNA, 22 bp, Artificial Sequence
  Target HLA Sequence complement
tggtgcactgagctgtaacttc

SEQ ID NO: 11569 - DNA, 22 bp, Artificial Sequence
  Target HLA Sequence complement
ggtgcactgagctgtaacttct

SEQ ID NO: 11570 - DNA, 22 bp, Artificial Sequence
  Target HLA Sequence complement
gtgcactgagctgtaacttctt

SEQ ID NO: 11571 - DNA, 22 bp, Artificial Sequence
  Target HLA Sequence complement
tgcactgagctgtaacttcttc

SEQ ID NO: 11572 - DNA, 22 bp, Artificial Sequence
  Target HLA Sequence complement
gcactgagctgtaacttcttcc

SEQ ID NO: 11573 - DNA, 22 bp, Artificial Sequence
  Target HLA Sequence complement
cactgagctgtaacttcttcct

SEQ ID NO: 11574 - DNA, 22 bp, Artificial Sequence
  Target HLA Sequence complement
actgagctgtaacttcttcctt

SEQ ID NO: 11575 - DNA, 22 bp, Artificial Sequence
  Target HLA Sequence complement
ctgagctgtaacttcttccttc

SEQ ID NO: 11576 - DNA, 22 bp, Artificial Sequence
  Target HLA Sequence complement
tgagctgtaacttcttccttcc

SEQ ID NO: 11577 - DNA, 22 bp, Artificial Sequence
  Target HLA Sequence complement
gagctgtaacttcttccttccc

SEQ ID NO: 11578 - DNA, 22 bp, Artificial Sequence
  Target HLA Sequence complement
agctgtaacttcttccttccct

SEQ ID NO: 11579 - DNA, 22 bp, Artificial Sequence
  Target HLA Sequence complement
gctgtaacttcttccttcccta

SEQ ID NO: 11580 - DNA, 22 bp, Artificial Sequence
  Target HLA Sequence complement
ctgtaacttcttccttccctat

SEQ ID NO: 11581 - DNA, 22 bp, Artificial Sequence
  Target HLA Sequence complement
tgtaacttcttccttccctatt

SEQ ID NO: 11582 - DNA, 22 bp, Artificial Sequence
  Target HLA Sequence complement
gtaacttcttccttccctatta

SEQ ID NO: 11583 - DNA, 22 bp, Artificial Sequence
  Target HLA Sequence complement
taacttcttccttccctattaa

SEQ ID NO: 11584 - DNA, 22 bp, Artificial Sequence
  Target HLA Sequence complement
aacttcttccttccctattaaa

SEQ ID NO: 11585 - DNA, 18 bp, Artificial Sequence
  Target HLA Sequence complement
cggtgtatggattgggga

SEQ ID NO: 11586 - DNA, 18 bp, Artificial Sequence
  Target HLA Sequence complement
ggtgtatggattggggag

SEQ ID NO: 11587 - DNA, 18 bp, Artificial Sequence
  Target HLA Sequence complement
gtgtatggattggggagt

SEQ ID NO: 11588 - DNA, 18 bp, Artificial Sequence
  Target HLA Sequence complement
tgtatggattggggagtc

SEQ ID NO: 11589 - DNA, 18 bp, Artificial Sequence
  Target HLA Sequence complement
gtatggattggggagtcc

SEQ ID NO: 11590 - DNA, 18 bp, Artificial Sequence
  Target HLA Sequence complement
tatggattggggagtccc

SEQ ID NO: 11591 - DNA, 18 bp, Artificial Sequence
  Target HLA Sequence complement
atggattggggagtccca

SEQ ID NO: 11592 - DNA, 18 bp, Artificial Sequence
  Target HLA Sequence complement
cttggggattccccaact

SEQ ID NO: 11593 - DNA, 18 bp, Artificial Sequence
  Target HLA Sequence complement
ttggggattccccaactc

SEQ ID NO: 11594 - DNA, 18 bp, Artificial Sequence
  Target HLA Sequence complement
attccccaactccgcagt

SEQ ID NO: 11595 - DNA, 18 bp, Artificial Sequence
  Target HLA Sequence complement
ttccccaactccgcagtt

SEQ ID NO: 11596 - DNA, 18 bp, Artificial Sequence
  Target HLA Sequence complement
tccccaactccgcagttt

SEQ ID NO: 11597 - DNA, 18 bp, Artificial Sequence
  Target HLA Sequence complement
aactccgcagtttctttt

SEQ ID NO: 11598 - DNA, 18 bp, Artificial Sequence
  Target HLA Sequence complement
actccgcagtttcttttc

SEQ ID NO: 11599 - DNA, 18 bp, Artificial Sequence
  Target HLA Sequence complement
ctccgcagtttcttttct

SEQ ID NO: 11600 - DNA, 18 bp, Artificial Sequence
  Target HLA Sequence complement
tccgcagtttcttttctc

SEQ ID NO: 11601 - DNA, 18 bp, Artificial Sequence
  Target HLA Sequence complement
ccgcagtttcttttctcc

SEQ ID NO: 11602 - DNA, 18 bp, Artificial Sequence
  Target HLA Sequence complement
cgcagtttcttttctccc

SEQ ID NO: 11603 - DNA, 18 bp, Artificial Sequence
  Target HLA Sequence complement
gcagtttcttttctccct

SEQ ID NO: 11604 - DNA, 18 bp, Artificial Sequence
  Target HLA Sequence complement
cagtttcttttctccctc

SEQ ID NO: 11605 - DNA, 18 bp, Artificial Sequence
  Target HLA Sequence complement
agtttcttttctccctct

SEQ ID NO: 11606 - DNA, 18 bp, Artificial Sequence
  Target HLA Sequence complement
gtttcttttctccctctc

SEQ ID NO: 11607 - DNA, 18 bp, Artificial Sequence
  Target HLA Sequence complement
tttcttttctccctctcc

SEQ ID NO: 11608 - DNA, 18 bp, Artificial Sequence
  Target HLA Sequence complement
ttcttttctccctctccc

SEQ ID NO: 11609 - DNA, 18 bp, Artificial Sequence
  Target HLA Sequence complement
tcttttctccctctccca

SEQ ID NO: 11610 - DNA, 18 bp, Artificial Sequence
  Target HLA Sequence complement
cttttctccctctcccaa

SEQ ID NO: 11611 - DNA, 18 bp, Artificial Sequence
  Target HLA Sequence complement
ttttctccctctcccaac

SEQ ID NO: 11612 - DNA, 18 bp, Artificial Sequence
  Target HLA Sequence complement
ggactcagattctcccca

SEQ ID NO: 11613 - DNA, 18 bp, Artificial Sequence
  Target HLA Sequence complement
gactcagattctccccag

SEQ ID NO: 11614 - DNA, 18 bp, Artificial Sequence
  Target HLA Sequence complement
actcagattctccccaga

SEQ ID NO: 11615 - DNA, 18 bp, Artificial Sequence
  Target HLA Sequence complement
ctcagattctccccagac

SEQ ID NO: 11616 - DNA, 18 bp, Artificial Sequence
  Target HLA Sequence complement
tcagattctccccagacg

SEQ ID NO: 11617 - DNA, 18 bp, Artificial Sequence
  Target HLA Sequence complement
agtattgggacggggaga

SEQ ID NO: 11618 - DNA, 18 bp, Artificial Sequence
  Target HLA Sequence complement
tattgggacggggagaca

SEQ ID NO: 11619 - DNA, 18 bp, Artificial Sequence
  Target HLA Sequence complement
acgcccccaaaacgcata

SEQ ID NO: 11620 - DNA, 18 bp, Artificial Sequence
  Target HLA Sequence complement
cgcccccaaaacgcatat

SEQ ID NO: 11621 - DNA, 18 bp, Artificial Sequence
  Target HLA Sequence complement
gcccccaaaacgcatatg

SEQ ID NO: 11622 - DNA, 18 bp, Artificial Sequence
  Target HLA Sequence complement
cccccaaaacgcatatga

SEQ ID NO: 11623 - DNA, 18 bp, Artificial Sequence
  Target HLA Sequence complement
ccccaaaacgcatatgac

SEQ ID NO: 11624 - DNA, 18 bp, Artificial Sequence
  Target HLA Sequence complement
cccaaaacgcatatgact

SEQ ID NO: 11625 - DNA, 18 bp, Artificial Sequence
  Target HLA Sequence complement
ccaaaacgcatatgactc

SEQ ID NO: 11626 - DNA, 18 bp, Artificial Sequence
  Target HLA Sequence complement
caaaacgcatatgactca

SEQ ID NO: 11627 - DNA, 18 bp, Artificial Sequence
  Target HLA Sequence complement
aaaacgcatatgactcac

SEQ ID NO: 11628 - DNA, 18 bp, Artificial Sequence
  Target HLA Sequence complement
tgcaggggatggaacctt

SEQ ID NO: 11629 - DNA, 18 bp, Artificial Sequence
  Target HLA Sequence complement
aggggatggaaccttcca

SEQ ID NO: 11630 - DNA, 18 bp, Artificial Sequence
  Target HLA Sequence complement
aagagctcagatagaaaa

SEQ ID NO: 11631 - DNA, 18 bp, Artificial Sequence
  Target HLA Sequence complement
agagctcagatagaaaag

SEQ ID NO: 11632 - DNA, 18 bp, Artificial Sequence
  Target HLA Sequence complement
gagctcagatagaaaagg

SEQ ID NO: 11633 - DNA, 18 bp, Artificial Sequence
  Target HLA Sequence complement
agctcagatagaaaagga

SEQ ID NO: 11634 - DNA, 18 bp, Artificial Sequence
  Target HLA Sequence complement
gctcagatagaaaaggag

SEQ ID NO: 11635 - DNA, 18 bp, Artificial Sequence
  Target HLA Sequence complement
ctcagatagaaaaggagg

SEQ ID NO: 11636 - DNA, 18 bp, Artificial Sequence
  Target HLA Sequence complement
tcagatagaaaaggaggg

SEQ ID NO: 11637 - DNA, 18 bp, Artificial Sequence
  Target HLA Sequence complement
cagatagaaaaggaggga

SEQ ID NO: 11638 - DNA, 18 bp, Artificial Sequence
  Target HLA Sequence complement
agatagaaaaggagggag

SEQ ID NO: 11639 - DNA, 18 bp, Artificial Sequence
  Target HLA Sequence complement
gatagaaaaggagggagc

SEQ ID NO: 11640 - DNA, 18 bp, Artificial Sequence
  Target HLA Sequence complement
atagaaaaggagggagct

SEQ ID NO: 11641 - DNA, 18 bp, Artificial Sequence
  Target HLA Sequence complement
tagaaaaggagggagcta

SEQ ID NO: 11642 - DNA, 18 bp, Artificial Sequence
  Target HLA Sequence complement
agaaaaggagggagctac

SEQ ID NO: 11643 - DNA, 18 bp, Artificial Sequence
  Target HLA Sequence complement
gaaaaggagggagctact

SEQ ID NO: 11644 - DNA, 18 bp, Artificial Sequence
  Target HLA Sequence complement
aaaaggagggagctactc

SEQ ID NO: 11645 - DNA, 18 bp, Artificial Sequence
  Target HLA Sequence complement
taatgtgaggaggtgggg

SEQ ID NO: 11646 - DNA, 18 bp, Artificial Sequence
  Target HLA Sequence complement
aatgtgaggaggtgggga

SEQ ID NO: 11647 - DNA, 18 bp, Artificial Sequence
  Target HLA Sequence complement
tgctccctccccaatcat

SEQ ID NO: 11648 - DNA, 18 bp, Artificial Sequence
  Target HLA Sequence complement
ctccctccccaatcatct

SEQ ID NO: 11649 - DNA, 18 bp, Artificial Sequence
  Target HLA Sequence complement
tccctccccaatcatctt

SEQ ID NO: 11650 - DNA, 18 bp, Artificial Sequence
  Target HLA Sequence complement
ccctccccaatcatcttt

SEQ ID NO: 11651 - DNA, 18 bp, Artificial Sequence
  Target HLA Sequence complement
cctccccaatcatctttc

SEQ ID NO: 11652 - DNA, 18 bp, Artificial Sequence
  Target HLA Sequence complement
ctccccaatcatctttcc

SEQ ID NO: 11653 - DNA, 18 bp, Artificial Sequence
  Target HLA Sequence complement
tccccaatcatctttcct

SEQ ID NO: 11654 - DNA, 18 bp, Artificial Sequence
  Target HLA Sequence complement
ccccaatcatctttcctg

SEQ ID NO: 11655 - DNA, 18 bp, Artificial Sequence
  Target HLA Sequence complement
cttccttccctattaaaa

SEQ ID NO: 11656 - DNA, 19 bp, Artificial Sequence
  Target HLA Sequence complement
gcggtgtatggattgggga

SEQ ID NO: 11657 - DNA, 19 bp, Artificial Sequence
  Target HLA Sequence complement
cggtgtatggattggggag

SEQ ID NO: 11658 - DNA, 19 bp, Artificial Sequence
  Target HLA Sequence complement
ggtgtatggattggggagt

SEQ ID NO: 11659 - DNA, 19 bp, Artificial Sequence
  Target HLA Sequence complement
gtgtatggattggggagtc

SEQ ID NO: 11660 - DNA, 19 bp, Artificial Sequence
  Target HLA Sequence complement
tgtatggattggggagtcc

SEQ ID NO: 11661 - DNA, 19 bp, Artificial Sequence
  Target HLA Sequence complement
gtatggattggggagtccc

SEQ ID NO: 11662 - DNA, 19 bp, Artificial Sequence
  Target HLA Sequence complement
tatggattggggagtccca

SEQ ID NO: 11663 - DNA, 19 bp, Artificial Sequence
  Target HLA Sequence complement
atggattggggagtcccag

SEQ ID NO: 11664 - DNA, 19 bp, Artificial Sequence
  Target HLA Sequence complement
attggggagtcccagcctt

SEQ ID NO: 11665 - DNA, 19 bp, Artificial Sequence
  Target HLA Sequence complement
agtcccagccttggggatt

SEQ ID NO: 11666 - DNA, 19 bp, Artificial Sequence
  Target HLA Sequence complement
agccttggggattccccaa

SEQ ID NO: 11667 - DNA, 19 bp, Artificial Sequence
  Target HLA Sequence complement
ccttggggattccccaact

SEQ ID NO: 11668 - DNA, 19 bp, Artificial Sequence
  Target HLA Sequence complement
cttggggattccccaactc

SEQ ID NO: 11669 - DNA, 19 bp, Artificial Sequence
  Target HLA Sequence complement
ttggggattccccaactcc

SEQ ID NO: 11670 - DNA, 19 bp, Artificial Sequence
  Target HLA Sequence complement
gattccccaactccgcagt

SEQ ID NO: 11671 - DNA, 19 bp, Artificial Sequence
  Target HLA Sequence complement
attccccaactccgcagtt

SEQ ID NO: 11672 - DNA, 19 bp, Artificial Sequence
  Target HLA Sequence complement
ttccccaactccgcagttt

SEQ ID NO: 11673 - DNA, 19 bp, Artificial Sequence
  Target HLA Sequence complement
tccccaactccgcagtttc

SEQ ID NO: 11674 - DNA, 19 bp, Artificial Sequence
  Target HLA Sequence complement
ccccaactccgcagtttct

SEQ ID NO: 11675 - DNA, 19 bp, Artificial Sequence
  Target HLA Sequence complement
caactccgcagtttctttt

SEQ ID NO: 11676 - DNA, 19 bp, Artificial Sequence
  Target HLA Sequence complement
aactccgcagtttcttttc

SEQ ID NO: 11677 - DNA, 19 bp, Artificial Sequence
  Target HLA Sequence complement
actccgcagtttcttttct

SEQ ID NO: 11678 - DNA, 19 bp, Artificial Sequence
  Target HLA Sequence complement
ctccgcagtttcttttctc

SEQ ID NO: 11679 - DNA, 19 bp, Artificial Sequence
  Target HLA Sequence complement
tccgcagtttcttttctcc

SEQ ID NO: 11680 - DNA, 19 bp, Artificial Sequence
  Target HLA Sequence complement
ccgcagtttcttttctccc

SEQ ID NO: 11681 - DNA, 19 bp, Artificial Sequence
  Target HLA Sequence complement
cgcagtttcttttctccct

SEQ ID NO: 11682 - DNA, 19 bp, Artificial Sequence
  Target HLA Sequence complement
gcagtttcttttctccctc

SEQ ID NO: 11683 - DNA, 19 bp, Artificial Sequence
  Target HLA Sequence complement
cagtttcttttctccctct

SEQ ID NO: 11684 - DNA, 19 bp, Artificial Sequence
  Target HLA Sequence complement
agtttcttttctccctctc

SEQ ID NO: 11685 - DNA, 19 bp, Artificial Sequence
  Target HLA Sequence complement
gtttcttttctccctctcc

SEQ ID NO: 11686 - DNA, 19 bp, Artificial Sequence
  Target HLA Sequence complement
tttcttttctccctctccc

SEQ ID NO: 11687 - DNA, 19 bp, Artificial Sequence
  Target HLA Sequence complement
ttcttttctccctctccca

SEQ ID NO: 11688 - DNA, 19 bp, Artificial Sequence
  Target HLA Sequence complement
tcttttctccctctcccaa

SEQ ID NO: 11689 - DNA, 19 bp, Artificial Sequence
  Target HLA Sequence complement
cttttctccctctcccaac

SEQ ID NO: 11690 - DNA, 19 bp, Artificial Sequence
  Target HLA Sequence complement
ttttctccctctcccaacc

SEQ ID NO: 11691 - DNA, 19 bp, Artificial Sequence
  Target HLA Sequence complement
gggactcagattctcccca

SEQ ID NO: 11692 - DNA, 19 bp, Artificial Sequence
  Target HLA Sequence complement
ggactcagattctccccag

SEQ ID NO: 11693 - DNA, 19 bp, Artificial Sequence
  Target HLA Sequence complement
gactcagattctccccaga

SEQ ID NO: 11694 - DNA, 19 bp, Artificial Sequence
  Target HLA Sequence complement
actcagattctccccagac

SEQ ID NO: 11695 - DNA, 19 bp, Artificial Sequence
  Target HLA Sequence complement
ctcagattctccccagacg

SEQ ID NO: 11696 - DNA, 19 bp, Artificial Sequence
  Target HLA Sequence complement
tcagattctccccagacgc

SEQ ID NO: 11697 - DNA, 19 bp, Artificial Sequence
  Target HLA Sequence complement
gagtattgggacggggaga

SEQ ID NO: 11698 - DNA, 19 bp, Artificial Sequence
  Target HLA Sequence complement
agtattgggacggggagac

SEQ ID NO: 11699 - DNA, 19 bp, Artificial Sequence
  Target HLA Sequence complement
gtattgggacggggagaca

SEQ ID NO: 11700 - DNA, 19 bp, Artificial Sequence
  Target HLA Sequence complement
tattgggacggggagacac

SEQ ID NO: 11701 - DNA, 19 bp, Artificial Sequence
  Target HLA Sequence complement
acggggagacacggaaagt

SEQ ID NO: 11702 - DNA, 19 bp, Artificial Sequence
  Target HLA Sequence complement
ggggagacacggaaagtga

SEQ ID NO: 11703 - DNA, 19 bp, Artificial Sequence
  Target HLA Sequence complement
tgcgcggctactacaacca

SEQ ID NO: 11704 - DNA, 19 bp, Artificial Sequence
  Target HLA Sequence complement
gacgcccccaaaacgcata

SEQ ID NO: 11705 - DNA, 19 bp, Artificial Sequence
  Target HLA Sequence complement
acgcccccaaaacgcatat

SEQ ID NO: 11706 - DNA, 19 bp, Artificial Sequence
  Target HLA Sequence complement
cgcccccaaaacgcatatg

SEQ ID NO: 11707 - DNA, 19 bp, Artificial Sequence
  Target HLA Sequence complement
gcccccaaaacgcatatga

SEQ ID NO: 11708 - DNA, 19 bp, Artificial Sequence
  Target HLA Sequence complement
cccccaaaacgcatatgac

SEQ ID NO: 11709 - DNA, 19 bp, Artificial Sequence
  Target HLA Sequence complement
ccccaaaacgcatatgact

SEQ ID NO: 11710 - DNA, 19 bp, Artificial Sequence
  Target HLA Sequence complement
cccaaaacgcatatgactc

SEQ ID NO: 11711 - DNA, 19 bp, Artificial Sequence
  Target HLA Sequence complement
ccaaaacgcatatgactca

SEQ ID NO: 11712 - DNA, 19 bp, Artificial Sequence
  Target HLA Sequence complement
caaaacgcatatgactcac

SEQ ID NO: 11713 - DNA, 19 bp, Artificial Sequence
  Target HLA Sequence complement
aaaacgcatatgactcacc

SEQ ID NO: 11714 - DNA, 19 bp, Artificial Sequence
  Target HLA Sequence complement
ctgcaggggatggaacctt

SEQ ID NO: 11715 - DNA, 19 bp, Artificial Sequence
  Target HLA Sequence complement
tgcaggggatggaaccttc

SEQ ID NO: 11716 - DNA, 19 bp, Artificial Sequence
  Target HLA Sequence complement
caggggatggaaccttcca

SEQ ID NO: 11717 - DNA, 19 bp, Artificial Sequence
  Target HLA Sequence complement
aggggatggaaccttccag

SEQ ID NO: 11718 - DNA, 19 bp, Artificial Sequence
  Target HLA Sequence complement
ggggatggaaccttccaga

SEQ ID NO: 11719 - DNA, 19 bp, Artificial Sequence
  Target HLA Sequence complement
aagcccctcaccctgagat

SEQ ID NO: 11720 - DNA, 19 bp, Artificial Sequence
  Target HLA Sequence complement
atccccatcgtgggcatca

SEQ ID NO: 11721 - DNA, 19 bp, Artificial Sequence
  Target HLA Sequence complement
tccccatcgtgggcatcat

SEQ ID NO: 11722 - DNA, 19 bp, Artificial Sequence
  Target HLA Sequence complement
ccccatcgtgggcatcatt

SEQ ID NO: 11723 - DNA, 19 bp, Artificial Sequence
  Target HLA Sequence complement
gaagagctcagatagaaaa

SEQ ID NO: 11724 - DNA, 19 bp, Artificial Sequence
  Target HLA Sequence complement
aagagctcagatagaaaag

SEQ ID NO: 11725 - DNA, 19 bp, Artificial Sequence
  Target HLA Sequence complement
agagctcagatagaaaagg

SEQ ID NO: 11726 - DNA, 19 bp, Artificial Sequence
  Target HLA Sequence complement
gagctcagatagaaaagga

SEQ ID NO: 11727 - DNA, 19 bp, Artificial Sequence
  Target HLA Sequence complement
agctcagatagaaaaggag

SEQ ID NO: 11728 - DNA, 19 bp, Artificial Sequence
  Target HLA Sequence complement
gctcagatagaaaaggagg

SEQ ID NO: 11729 - DNA, 19 bp, Artificial Sequence
  Target HLA Sequence complement
ctcagatagaaaaggaggg

SEQ ID NO: 11730 - DNA, 19 bp, Artificial Sequence
  Target HLA Sequence complement
tcagatagaaaaggaggga

SEQ ID NO: 11731 - DNA, 19 bp, Artificial Sequence
  Target HLA Sequence complement
cagatagaaaaggagggag

SEQ ID NO: 11732 - DNA, 19 bp, Artificial Sequence
  Target HLA Sequence complement
agatagaaaaggagggagc

SEQ ID NO: 11733 - DNA, 19 bp, Artificial Sequence
  Target HLA Sequence complement
gatagaaaaggagggagct

SEQ ID NO: 11734 - DNA, 19 bp, Artificial Sequence
  Target HLA Sequence complement
atagaaaaggagggagcta

SEQ ID NO: 11735 - DNA, 19 bp, Artificial Sequence
  Target HLA Sequence complement
tagaaaaggagggagctac

SEQ ID NO: 11736 - DNA, 19 bp, Artificial Sequence
  Target HLA Sequence complement
agaaaaggagggagctact

SEQ ID NO: 11737 - DNA, 19 bp, Artificial Sequence
  Target HLA Sequence complement
gaaaaggagggagctactc

SEQ ID NO: 11738 - DNA, 19 bp, Artificial Sequence
  Target HLA Sequence complement
aaaaggagggagctactct

SEQ ID NO: 11739 - DNA, 19 bp, Artificial Sequence
  Target HLA Sequence complement
ataatgtgaggaggtgggg

SEQ ID NO: 11740 - DNA, 19 bp, Artificial Sequence
  Target HLA Sequence complement
taatgtgaggaggtgggga

SEQ ID NO: 11741 - DNA, 19 bp, Artificial Sequence
  Target HLA Sequence complement
aatgtgaggaggtggggag

SEQ ID NO: 11742 - DNA, 19 bp, Artificial Sequence
  Target HLA Sequence complement
atgtgaggaggtggggaga

SEQ ID NO: 11743 - DNA, 19 bp, Artificial Sequence
  Target HLA Sequence complement
acccccatgtccaccatga

SEQ ID NO: 11744 - DNA, 19 bp, Artificial Sequence
  Target HLA Sequence complement
tgtgctccctccccaatca

SEQ ID NO: 11745 - DNA, 19 bp, Artificial Sequence
  Target HLA Sequence complement
gtgctccctccccaatcat

SEQ ID NO: 11746 - DNA, 19 bp, Artificial Sequence
  Target HLA Sequence complement
tgctccctccccaatcatc

SEQ ID NO: 11747 - DNA, 19 bp, Artificial Sequence
  Target HLA Sequence complement
gctccctccccaatcatct

SEQ ID NO: 11748 - DNA, 19 bp, Artificial Sequence
  Target HLA Sequence complement
ctccctccccaatcatctt

SEQ ID NO: 11749 - DNA, 19 bp, Artificial Sequence
  Target HLA Sequence complement
tccctccccaatcatcttt

SEQ ID NO: 11750 - DNA, 19 bp, Artificial Sequence
  Target HLA Sequence complement
ccctccccaatcatctttc

SEQ ID NO: 11751 - DNA, 19 bp, Artificial Sequence
  Target HLA Sequence complement
cctccccaatcatctttcc

SEQ ID NO: 11752 - DNA, 19 bp, Artificial Sequence
  Target HLA Sequence complement
ctccccaatcatctttcct

SEQ ID NO: 11753 - DNA, 19 bp, Artificial Sequence
  Target HLA Sequence complement
tccccaatcatctttcctg

SEQ ID NO: 11754 - DNA, 19 bp, Artificial Sequence
  Target HLA Sequence complement
ccccaatcatctttcctgt

SEQ ID NO: 11755 - DNA, 19 bp, Artificial Sequence
  Target HLA Sequence complement
tcttccttccctattaaaa

SEQ ID NO: 11756 - DNA, 20 bp, Artificial Sequence
  Target HLA Sequence complement
cggtgtatggattggggagt

SEQ ID NO: 11757 - DNA, 20 bp, Artificial Sequence
  Target HLA Sequence complement
ggtgtatggattggggagtc

SEQ ID NO: 11758 - DNA, 20 bp, Artificial Sequence
  Target HLA Sequence complement
gtgtatggattggggagtcc

SEQ ID NO: 11759 - DNA, 20 bp, Artificial Sequence
  Target HLA Sequence complement
tgtatggattggggagtccc

SEQ ID NO: 11760 - DNA, 20 bp, Artificial Sequence
  Target HLA Sequence complement
gtatggattggggagtccca

SEQ ID NO: 11761 - DNA, 20 bp, Artificial Sequence
  Target HLA Sequence complement
tatggattggggagtcccag

SEQ ID NO: 11762 - DNA, 20 bp, Artificial Sequence
  Target HLA Sequence complement
gattccccaactccgcagtt

SEQ ID NO: 11763 - DNA, 20 bp, Artificial Sequence
  Target HLA Sequence complement
attccccaactccgcagttt

SEQ ID NO: 11764 - DNA, 20 bp, Artificial Sequence
  Target HLA Sequence complement
ttccccaactccgcagtttc

SEQ ID NO: 11765 - DNA, 20 bp, Artificial Sequence
  Target HLA Sequence complement
tccccaactccgcagtttct

SEQ ID NO: 11766 - DNA, 20 bp, Artificial Sequence
  Target HLA Sequence complement
ccccaactccgcagtttctt

SEQ ID NO: 11767 - DNA, 20 bp, Artificial Sequence
  Target HLA Sequence complement
ccaactccgcagtttctttt

SEQ ID NO: 11768 - DNA, 20 bp, Artificial Sequence
  Target HLA Sequence complement
caactccgcagtttcttttc

SEQ ID NO: 11769 - DNA, 20 bp, Artificial Sequence
  Target HLA Sequence complement
aactccgcagtttcttttct

SEQ ID NO: 11770 - DNA, 20 bp, Artificial Sequence
  Target HLA Sequence complement
actccgcagtttcttttctc

SEQ ID NO: 11771 - DNA, 20 bp, Artificial Sequence
  Target HLA Sequence complement
ctccgcagtttcttttctcc

SEQ ID NO: 11772 - DNA, 20 bp, Artificial Sequence
  Target HLA Sequence complement
tccgcagtttcttttctccc

SEQ ID NO: 11773 - DNA, 20 bp, Artificial Sequence
  Target HLA Sequence complement
ccgcagtttcttttctccct

SEQ ID NO: 11774 - DNA, 20 bp, Artificial Sequence
  Target HLA Sequence complement
cgcagtttcttttctccctc

SEQ ID NO: 11775 - DNA, 20 bp, Artificial Sequence
  Target HLA Sequence complement
gcagtttcttttctccctct

SEQ ID NO: 11776 - DNA, 20 bp, Artificial Sequence
  Target HLA Sequence complement
cagtttcttttctccctctc

SEQ ID NO: 11777 - DNA, 20 bp, Artificial Sequence
  Target HLA Sequence complement
agtttcttttctccctctcc

SEQ ID NO: 11778 - DNA, 20 bp, Artificial Sequence
  Target HLA Sequence complement
gtttcttttctccctctccc

SEQ ID NO: 11779 - DNA, 20 bp, Artificial Sequence
  Target HLA Sequence complement
tttcttttctccctctccca

SEQ ID NO: 11780 - DNA, 20 bp, Artificial Sequence
  Target HLA Sequence complement
ttcttttctccctctcccaa

SEQ ID NO: 11781 - DNA, 20 bp, Artificial Sequence
  Target HLA Sequence complement
tcttttctccctctcccaac

SEQ ID NO: 11782 - DNA, 20 bp, Artificial Sequence
  Target HLA Sequence complement
cttttctccctctcccaacc

SEQ ID NO: 11783 - DNA, 20 bp, Artificial Sequence
  Target HLA Sequence complement
ttttctccctctcccaacct

SEQ ID NO: 11784 - DNA, 20 bp, Artificial Sequence
  Target HLA Sequence complement
ggactcagattctccccaga

SEQ ID NO: 11785 - DNA, 20 bp, Artificial Sequence
  Target HLA Sequence complement
gactcagattctccccagac

SEQ ID NO: 11786 - DNA, 20 bp, Artificial Sequence
  Target HLA Sequence complement
actcagattctccccagacg

SEQ ID NO: 11787 - DNA, 20 bp, Artificial Sequence
  Target HLA Sequence complement
agtattgggacggggagaca

SEQ ID NO: 11788 - DNA, 20 bp, Artificial Sequence
  Target HLA Sequence complement
ggggagacacggaaagtgaa

SEQ ID NO: 11789 - DNA, 20 bp, Artificial Sequence
  Target HLA Sequence complement
gacgcccccaaaacgcatat

SEQ ID NO: 11790 - DNA, 20 bp, Artificial Sequence
  Target HLA Sequence complement
acgcccccaaaacgcatatg

SEQ ID NO: 11791 - DNA, 20 bp, Artificial Sequence
  Target HLA Sequence complement
cgcccccaaaacgcatatga

SEQ ID NO: 11792 - DNA, 20 bp, Artificial Sequence
  Target HLA Sequence complement
gcccccaaaacgcatatgac

SEQ ID NO: 11793 - DNA, 20 bp, Artificial Sequence
  Target HLA Sequence complement
cccccaaaacgcatatgact

SEQ ID NO: 11794 - DNA, 20 bp, Artificial Sequence
  Target HLA Sequence complement
ccccaaaacgcatatgactc

SEQ ID NO: 11795 - DNA, 20 bp, Artificial Sequence
  Target HLA Sequence complement
cccaaaacgcatatgactca

SEQ ID NO: 11796 - DNA, 20 bp, Artificial Sequence
  Target HLA Sequence complement
ccaaaacgcatatgactcac

SEQ ID NO: 11797 - DNA, 20 bp, Artificial Sequence
  Target HLA Sequence complement
caaaacgcatatgactcacc

SEQ ID NO: 11798 - DNA, 20 bp, Artificial Sequence
  Target HLA Sequence complement
aaaacgcatatgactcacca

SEQ ID NO: 11799 - DNA, 20 bp, Artificial Sequence
  Target HLA Sequence complement
aggggatggaaccttccaga

SEQ ID NO: 11800 - DNA, 20 bp, Artificial Sequence
  Target HLA Sequence complement
ggggatggaaccttccagaa

SEQ ID NO: 11801 - DNA, 20 bp, Artificial Sequence
  Target HLA Sequence complement
atccccatcgtgggcatcat

SEQ ID NO: 11802 - DNA, 20 bp, Artificial Sequence
  Target HLA Sequence complement
tccccatcgtgggcatcatt

SEQ ID NO: 11803 - DNA, 20 bp, Artificial Sequence
  Target HLA Sequence complement
ggaagagctcagatagaaaa

SEQ ID NO: 11804 - DNA, 20 bp, Artificial Sequence
  Target HLA Sequence complement
gaagagctcagatagaaaag

SEQ ID NO: 11805 - DNA, 20 bp, Artificial Sequence
  Target HLA Sequence complement
aagagctcagatagaaaagg

SEQ ID NO: 11806 - DNA, 20 bp, Artificial Sequence
  Target HLA Sequence complement
agagctcagatagaaaagga

SEQ ID NO: 11807 - DNA, 20 bp, Artificial Sequence
  Target HLA Sequence complement
gagctcagatagaaaaggag

SEQ ID NO: 11808 - DNA, 20 bp, Artificial Sequence
  Target HLA Sequence complement
agctcagatagaaaaggagg

SEQ ID NO: 11809 - DNA, 20 bp, Artificial Sequence
  Target HLA Sequence complement
gctcagatagaaaaggaggg

SEQ ID NO: 11810 - DNA, 20 bp, Artificial Sequence
  Target HLA Sequence complement
ctcagatagaaaaggaggga

SEQ ID NO: 11811 - DNA, 20 bp, Artificial Sequence
  Target HLA Sequence complement
tcagatagaaaaggagggag

SEQ ID NO: 11812 - DNA, 20 bp, Artificial Sequence
  Target HLA Sequence complement
cagatagaaaaggagggagc

SEQ ID NO: 11813 - DNA, 20 bp, Artificial Sequence
  Target HLA Sequence complement
agatagaaaaggagggagct

SEQ ID NO: 11814 - DNA, 20 bp, Artificial Sequence
  Target HLA Sequence complement
gatagaaaaggagggagcta

SEQ ID NO: 11815 - DNA, 20 bp, Artificial Sequence
  Target HLA Sequence complement
atagaaaaggagggagctac

SEQ ID NO: 11816 - DNA, 20 bp, Artificial Sequence
  Target HLA Sequence complement
tagaaaaggagggagctact

SEQ ID NO: 11817 - DNA, 20 bp, Artificial Sequence
  Target HLA Sequence complement
agaaaaggagggagctactc

SEQ ID NO: 11818 - DNA, 20 bp, Artificial Sequence
  Target HLA Sequence complement
gaaaaggagggagctactct

SEQ ID NO: 11819 - DNA, 20 bp, Artificial Sequence
  Target HLA Sequence complement
aaaaggagggagctactctc

SEQ ID NO: 11820 - DNA, 20 bp, Artificial Sequence
  Target HLA Sequence complement
cataatgtgaggaggtgggg

SEQ ID NO: 11821 - DNA, 20 bp, Artificial Sequence
  Target HLA Sequence complement
ataatgtgaggaggtgggga

SEQ ID NO: 11822 - DNA, 20 bp, Artificial Sequence
  Target HLA Sequence complement
taatgtgaggaggtggggag

SEQ ID NO: 11823 - DNA, 20 bp, Artificial Sequence
  Target HLA Sequence complement
aatgtgaggaggtggggaga

SEQ ID NO: 11824 - DNA, 20 bp, Artificial Sequence
  Target HLA Sequence complement
tgtgctccctccccaatcat

SEQ ID NO: 11825 - DNA, 20 bp, Artificial Sequence
  Target HLA Sequence complement
tgctccctccccaatcatct

SEQ ID NO: 11826 - DNA, 20 bp, Artificial Sequence
  Target HLA Sequence complement
gctccctccccaatcatctt

SEQ ID NO: 11827 - DNA, 20 bp, Artificial Sequence
  Target HLA Sequence complement
ctccctccccaatcatcttt

SEQ ID NO: 11828 - DNA, 20 bp, Artificial Sequence
  Target HLA Sequence complement
tccctccccaatcatctttc

SEQ ID NO: 11829 - DNA, 20 bp, Artificial Sequence
  Target HLA Sequence complement
ccctccccaatcatctttcc

SEQ ID NO: 11830 - DNA, 20 bp, Artificial Sequence
  Target HLA Sequence complement
cctccccaatcatctttcct

SEQ ID NO: 11831 - DNA, 20 bp, Artificial Sequence
  Target HLA Sequence complement
ctccccaatcatctttcctg

SEQ ID NO: 11832 - DNA, 20 bp, Artificial Sequence
  Target HLA Sequence complement
tccccaatcatctttcctgt

SEQ ID NO: 11833 - DNA, 20 bp, Artificial Sequence
  Target HLA Sequence complement
ccccaatcatctttcctgtt

SEQ ID NO: 11834 - DNA, 21 bp, Artificial Sequence
  Target HLA Sequence complement
aaggcggtgtatggattgggg

SEQ ID NO: 11835 - DNA, 21 bp, Artificial Sequence
  Target HLA Sequence complement
aggcggtgtatggattgggga

SEQ ID NO: 11836 - DNA, 21 bp, Artificial Sequence
  Target HLA Sequence complement
gcggtgtatggattggggagt

SEQ ID NO: 11837 - DNA, 21 bp, Artificial Sequence
  Target HLA Sequence complement
cggtgtatggattggggagtc

SEQ ID NO: 11838 - DNA, 21 bp, Artificial Sequence
  Target HLA Sequence complement
ggtgtatggattggggagtcc

SEQ ID NO: 11839 - DNA, 21 bp, Artificial Sequence
  Target HLA Sequence complement
gtgtatggattggggagtccc

SEQ ID NO: 11840 - DNA, 21 bp, Artificial Sequence
  Target HLA Sequence complement
tgtatggattggggagtccca

SEQ ID NO: 11841 - DNA, 21 bp, Artificial Sequence
  Target HLA Sequence complement
gtatggattggggagtcccag

SEQ ID NO: 11842 - DNA, 21 bp, Artificial Sequence
  Target HLA Sequence complement
tatggattggggagtcccagc

SEQ ID NO: 11843 - DNA, 21 bp, Artificial Sequence
  Target HLA Sequence complement
agccttggggattccccaact

SEQ ID NO: 11844 - DNA, 21 bp, Artificial Sequence
  Target HLA Sequence complement
ggattccccaactccgcagtt

SEQ ID NO: 11845 - DNA, 21 bp, Artificial Sequence
  Target HLA Sequence complement
gattccccaactccgcagttt

SEQ ID NO: 11846 - DNA, 21 bp, Artificial Sequence
  Target HLA Sequence complement
attccccaactccgcagtttc

SEQ ID NO: 11847 - DNA, 21 bp, Artificial Sequence
  Target HLA Sequence complement
ttccccaactccgcagtttct

SEQ ID NO: 11848 - DNA, 21 bp, Artificial Sequence
  Target HLA Sequence complement
tccccaactccgcagtttctt

SEQ ID NO: 11849 - DNA, 21 bp, Artificial Sequence
  Target HLA Sequence complement
ccccaactccgcagtttcttt

SEQ ID NO: 11850 - DNA, 21 bp, Artificial Sequence
  Target HLA Sequence complement
cccaactccgcagtttctttt

SEQ ID NO: 11851 - DNA, 21 bp, Artificial Sequence
  Target HLA Sequence complement
ccaactccgcagtttcttttc

SEQ ID NO: 11852 - DNA, 21 bp, Artificial Sequence
  Target HLA Sequence complement
caactccgcagtttcttttct

SEQ ID NO: 11853 - DNA, 21 bp, Artificial Sequence
  Target HLA Sequence complement
aactccgcagtttcttttctc

SEQ ID NO: 11854 - DNA, 21 bp, Artificial Sequence
  Target HLA Sequence complement
actccgcagtttcttttctcc

SEQ ID NO: 11855 - DNA, 21 bp, Artificial Sequence
  Target HLA Sequence complement
ctccgcagtttcttttctccc

SEQ ID NO: 11856 - DNA, 21 bp, Artificial Sequence
  Target HLA Sequence complement
tccgcagtttcttttctccct

SEQ ID NO: 11857 - DNA, 21 bp, Artificial Sequence
  Target HLA Sequence complement
ccgcagtttcttttctccctc

SEQ ID NO: 11858 - DNA, 21 bp, Artificial Sequence
  Target HLA Sequence complement
cgcagtttcttttctccctct

SEQ ID NO: 11859 - DNA, 21 bp, Artificial Sequence
  Target HLA Sequence complement
gcagtttcttttctccctctc

SEQ ID NO: 11860 - DNA, 21 bp, Artificial Sequence
  Target HLA Sequence complement
cagtttcttttctccctctcc

SEQ ID NO: 11861 - DNA, 21 bp, Artificial Sequence
  Target HLA Sequence complement
agtttcttttctccctctccc

SEQ ID NO: 11862 - DNA, 21 bp, Artificial Sequence
  Target HLA Sequence complement
gtttcttttctccctctccca

SEQ ID NO: 11863 - DNA, 21 bp, Artificial Sequence
  Target HLA Sequence complement
tttcttttctccctctcccaa

SEQ ID NO: 11864 - DNA, 21 bp, Artificial Sequence
  Target HLA Sequence complement
ttcttttctccctctcccaac

SEQ ID NO: 11865 - DNA, 21 bp, Artificial Sequence
  Target HLA Sequence complement
tcttttctccctctcccaacc

SEQ ID NO: 11866 - DNA, 21 bp, Artificial Sequence
  Target HLA Sequence complement
cttttctccctctcccaacct

SEQ ID NO: 11867 - DNA, 21 bp, Artificial Sequence
  Target HLA Sequence complement
ttttctccctctcccaaccta

SEQ ID NO: 11868 - DNA, 21 bp, Artificial Sequence
  Target HLA Sequence complement
gggactcagattctccccaga

SEQ ID NO: 11869 - DNA, 21 bp, Artificial Sequence
  Target HLA Sequence complement
ggactcagattctccccagac

SEQ ID NO: 11870 - DNA, 21 bp, Artificial Sequence
  Target HLA Sequence complement
gactcagattctccccagacg

SEQ ID NO: 11871 - DNA, 21 bp, Artificial Sequence
  Target HLA Sequence complement
actcagattctccccagacgc

SEQ ID NO: 11872 - DNA, 21 bp, Artificial Sequence
  Target HLA Sequence complement
gagtattgggacggggagaca

SEQ ID NO: 11873 - DNA, 21 bp, Artificial Sequence
  Target HLA Sequence complement
agtattgggacggggagacac

SEQ ID NO: 11874 - DNA, 21 bp, Artificial Sequence
  Target HLA Sequence complement
acggggagacacggaaagtga

SEQ ID NO: 11875 - DNA, 21 bp, Artificial Sequence
  Target HLA Sequence complement
cggggagacacggaaagtgaa

SEQ ID NO: 11876 - DNA, 21 bp, Artificial Sequence
  Target HLA Sequence complement
ggggagacacggaaagtgaag

SEQ ID NO: 11877 - DNA, 21 bp, Artificial Sequence
  Target HLA Sequence complement
tgcgcggctactacaaccaga

SEQ ID NO: 11878 - DNA, 21 bp, Artificial Sequence
  Target HLA Sequence complement
ggacgcccccaaaacgcatat

SEQ ID NO: 11879 - DNA, 21 bp, Artificial Sequence
  Target HLA Sequence complement
gacgcccccaaaacgcatatg

SEQ ID NO: 11880 - DNA, 21 bp, Artificial Sequence
  Target HLA Sequence complement
acgcccccaaaacgcatatga

SEQ ID NO: 11881 - DNA, 21 bp, Artificial Sequence
  Target HLA Sequence complement
cgcccccaaaacgcatatgac

SEQ ID NO: 11882 - DNA, 21 bp, Artificial Sequence
  Target HLA Sequence complement
gcccccaaaacgcatatgact

SEQ ID NO: 11883 - DNA, 21 bp, Artificial Sequence
  Target HLA Sequence complement
cccccaaaacgcatatgactc

SEQ ID NO: 11884 - DNA, 21 bp, Artificial Sequence
  Target HLA Sequence complement
ccccaaaacgcatatgactca

SEQ ID NO: 11885 - DNA, 21 bp, Artificial Sequence
  Target HLA Sequence complement
cccaaaacgcatatgactcac

SEQ ID NO: 11886 - DNA, 21 bp, Artificial Sequence
  Target HLA Sequence complement
ccaaaacgcatatgactcacc

SEQ ID NO: 11887 - DNA, 21 bp, Artificial Sequence
  Target HLA Sequence complement
caaaacgcatatgactcacca

SEQ ID NO: 11888 - DNA, 21 bp, Artificial Sequence
  Target HLA Sequence complement
aaaacgcatatgactcaccac

SEQ ID NO: 11889 - DNA, 21 bp, Artificial Sequence
  Target HLA Sequence complement
tgcaggggatggaaccttcca

SEQ ID NO: 11890 - DNA, 21 bp, Artificial Sequence
  Target HLA Sequence complement
caggggatggaaccttccaga

SEQ ID NO: 11891 - DNA, 21 bp, Artificial Sequence
  Target HLA Sequence complement
aggggatggaaccttccagaa

SEQ ID NO: 11892 - DNA, 21 bp, Artificial Sequence
  Target HLA Sequence complement
ggggatggaaccttccagaag

SEQ ID NO: 11893 - DNA, 21 bp, Artificial Sequence
  Target HLA Sequence complement
catccccatcgtgggcatcat

SEQ ID NO: 11894 - DNA, 21 bp, Artificial Sequence
  Target HLA Sequence complement
atccccatcgtgggcatcatt

SEQ ID NO: 11895 - DNA, 21 bp, Artificial Sequence
  Target HLA Sequence complement
tccccatcgtgggcatcattg

SEQ ID NO: 11896 - DNA, 21 bp, Artificial Sequence
  Target HLA Sequence complement
aggaagagctcagatagaaaa

SEQ ID NO: 11897 - DNA, 21 bp, Artificial Sequence
  Target HLA Sequence complement
ggaagagctcagatagaaaag

SEQ ID NO: 11898 - DNA, 21 bp, Artificial Sequence
  Target HLA Sequence complement
gaagagctcagatagaaaagg

SEQ ID NO: 11899 - DNA, 21 bp, Artificial Sequence
  Target HLA Sequence complement
aagagctcagatagaaaagga

SEQ ID NO: 11900 - DNA, 21 bp, Artificial Sequence
  Target HLA Sequence complement
agagctcagatagaaaaggag

SEQ ID NO: 11901 - DNA, 21 bp, Artificial Sequence
  Target HLA Sequence complement
gagctcagatagaaaaggagg

SEQ ID NO: 11902 - DNA, 21 bp, Artificial Sequence
  Target HLA Sequence complement
agctcagatagaaaaggaggg

SEQ ID NO: 11903 - DNA, 21 bp, Artificial Sequence
  Target HLA Sequence complement
gctcagatagaaaaggaggga

SEQ ID NO: 11904 - DNA, 21 bp, Artificial Sequence
  Target HLA Sequence complement
ctcagatagaaaaggagggag

SEQ ID NO: 11905 - DNA, 21 bp, Artificial Sequence
  Target HLA Sequence complement
tcagatagaaaaggagggagc

SEQ ID NO: 11906 - DNA, 21 bp, Artificial Sequence
  Target HLA Sequence complement
cagatagaaaaggagggagct

SEQ ID NO: 11907 - DNA, 21 bp, Artificial Sequence
  Target HLA Sequence complement
agatagaaaaggagggagcta

SEQ ID NO: 11908 - DNA, 21 bp, Artificial Sequence
  Target HLA Sequence complement
gatagaaaaggagggagctac

SEQ ID NO: 11909 - DNA, 21 bp, Artificial Sequence
  Target HLA Sequence complement
atagaaaaggagggagctact

SEQ ID NO: 11910 - DNA, 21 bp, Artificial Sequence
  Target HLA Sequence complement
tagaaaaggagggagctactc

SEQ ID NO: 11911 - DNA, 21 bp, Artificial Sequence
  Target HLA Sequence complement
agaaaaggagggagctactct

SEQ ID NO: 11912 - DNA, 21 bp, Artificial Sequence
  Target HLA Sequence complement
gaaaaggagggagctactctc

SEQ ID NO: 11913 - DNA, 21 bp, Artificial Sequence
  Target HLA Sequence complement
aaaaggagggagctactctca

SEQ ID NO: 11914 - DNA, 21 bp, Artificial Sequence
  Target HLA Sequence complement
gcataatgtgaggaggtgggg

SEQ ID NO: 11915 - DNA, 21 bp, Artificial Sequence
  Target HLA Sequence complement
cataatgtgaggaggtgggga

SEQ ID NO: 11916 - DNA, 21 bp, Artificial Sequence
  Target HLA Sequence complement
ataatgtgaggaggtggggag

SEQ ID NO: 11917 - DNA, 21 bp, Artificial Sequence
  Target HLA Sequence complement
taatgtgaggaggtggggaga

SEQ ID NO: 11918 - DNA, 21 bp, Artificial Sequence
  Target HLA Sequence complement
aatgtgaggaggtggggagac

SEQ ID NO: 11919 - DNA, 21 bp, Artificial Sequence
  Target HLA Sequence complement
ctgtgctccctccccaatcat

SEQ ID NO: 11920 - DNA, 21 bp, Artificial Sequence
  Target HLA Sequence complement
tgtgctccctccccaatcatc

SEQ ID NO: 11921 - DNA, 21 bp, Artificial Sequence
  Target HLA Sequence complement
gtgctccctccccaatcatct

SEQ ID NO: 11922 - DNA, 21 bp, Artificial Sequence
  Target HLA Sequence complement
tgctccctccccaatcatctt

SEQ ID NO: 11923 - DNA, 21 bp, Artificial Sequence
  Target HLA Sequence complement
gctccctccccaatcatcttt

SEQ ID NO: 11924 - DNA, 21 bp, Artificial Sequence
  Target HLA Sequence complement
ctccctccccaatcatctttc

SEQ ID NO: 11925 - DNA, 21 bp, Artificial Sequence
  Target HLA Sequence complement
tccctccccaatcatctttcc

SEQ ID NO: 11926 - DNA, 21 bp, Artificial Sequence
  Target HLA Sequence complement
ccctccccaatcatctttcct

SEQ ID NO: 11927 - DNA, 21 bp, Artificial Sequence
  Target HLA Sequence complement
cctccccaatcatctttcctg

SEQ ID NO: 11928 - DNA, 21 bp, Artificial Sequence
  Target HLA Sequence complement
ctccccaatcatctttcctgt

SEQ ID NO: 11929 - DNA, 21 bp, Artificial Sequence
  Target HLA Sequence complement
tccccaatcatctttcctgtt

SEQ ID NO: 11930 - DNA, 21 bp, Artificial Sequence
  Target HLA Sequence complement
ccccaatcatctttcctgttc

SEQ ID NO: 11931 - DNA, 22 bp, Artificial Sequence
  Target HLA Sequence complement
ccccgaaggcggtgtatggatt

SEQ ID NO: 11932 - DNA, 22 bp, Artificial Sequence
  Target HLA Sequence complement
gaaggcggtgtatggattgggg

SEQ ID NO: 11933 - DNA, 22 bp, Artificial Sequence
  Target HLA Sequence complement
aaggcggtgtatggattgggga

SEQ ID NO: 11934 - DNA, 22 bp, Artificial Sequence
  Target HLA Sequence complement
aggcggtgtatggattggggag

SEQ ID NO: 11935 - DNA, 22 bp, Artificial Sequence
  Target HLA Sequence complement
ggcggtgtatggattggggagt

SEQ ID NO: 11936 - DNA, 22 bp, Artificial Sequence
  Target HLA Sequence complement
gcggtgtatggattggggagtc

SEQ ID NO: 11937 - DNA, 22 bp, Artificial Sequence
  Target HLA Sequence complement
cggtgtatggattggggagtcc

SEQ ID NO: 11938 - DNA, 22 bp, Artificial Sequence
  Target HLA Sequence complement
ggtgtatggattggggagtccc

SEQ ID NO: 11939 - DNA, 22 bp, Artificial Sequence
  Target HLA Sequence complement
gtgtatggattggggagtccca

SEQ ID NO: 11940 - DNA, 22 bp, Artificial Sequence
  Target HLA Sequence complement
tgtatggattggggagtcccag

SEQ ID NO: 11941 - DNA, 22 bp, Artificial Sequence
  Target HLA Sequence complement
gtatggattggggagtcccagc

SEQ ID NO: 11942 - DNA, 22 bp, Artificial Sequence
  Target HLA Sequence complement
tatggattggggagtcccagcc

SEQ ID NO: 11943 - DNA, 22 bp, Artificial Sequence
  Target HLA Sequence complement
atggattggggagtcccagcct

SEQ ID NO: 11944 - DNA, 22 bp, Artificial Sequence
  Target HLA Sequence complement
tggattggggagtcccagcctt

SEQ ID NO: 11945 - DNA, 22 bp, Artificial Sequence
  Target HLA Sequence complement
cagccttggggattccccaact

SEQ ID NO: 11946 - DNA, 22 bp, Artificial Sequence
  Target HLA Sequence complement
agccttggggattccccaactc

SEQ ID NO: 11947 - DNA, 22 bp, Artificial Sequence
  Target HLA Sequence complement
ttggggattccccaactccgca

SEQ ID NO: 11948 - DNA, 22 bp, Artificial Sequence
  Target HLA Sequence complement
gggattccccaactccgcagtt

SEQ ID NO: 11949 - DNA, 22 bp, Artificial Sequence
  Target HLA Sequence complement
ggattccccaactccgcagttt

SEQ ID NO: 11950 - DNA, 22 bp, Artificial Sequence
  Target HLA Sequence complement
gattccccaactccgcagtttc

SEQ ID NO: 11951 - DNA, 22 bp, Artificial Sequence
  Target HLA Sequence complement
attccccaactccgcagtttct

SEQ ID NO: 11952 - DNA, 22 bp, Artificial Sequence
  Target HLA Sequence complement
ttccccaactccgcagtttctt

SEQ ID NO: 11953 - DNA, 22 bp, Artificial Sequence
  Target HLA Sequence complement
tccccaactccgcagtttcttt

SEQ ID NO: 11954 - DNA, 22 bp, Artificial Sequence
  Target HLA Sequence complement
ccccaactccgcagtttctttt

SEQ ID NO: 11955 - DNA, 22 bp, Artificial Sequence
  Target HLA Sequence complement
cccaactccgcagtttcttttc

SEQ ID NO: 11956 - DNA, 22 bp, Artificial Sequence
  Target HLA Sequence complement
ccaactccgcagtttcttttct

SEQ ID NO: 11957 - DNA, 22 bp, Artificial Sequence
  Target HLA Sequence complement
caactccgcagtttcttttctc

SEQ ID NO: 11958 - DNA, 22 bp, Artificial Sequence
  Target HLA Sequence complement
aactccgcagtttcttttctcc

SEQ ID NO: 11959 - DNA, 22 bp, Artificial Sequence
  Target HLA Sequence complement
actccgcagtttcttttctccc

SEQ ID NO: 11960 - DNA, 22 bp, Artificial Sequence
  Target HLA Sequence complement
ctccgcagtttcttttctccct

SEQ ID NO: 11961 - DNA, 22 bp, Artificial Sequence
  Target HLA Sequence complement
tccgcagtttcttttctccctc

SEQ ID NO: 11962 - DNA, 22 bp, Artificial Sequence
  Target HLA Sequence complement
ccgcagtttcttttctccctct

SEQ ID NO: 11963 - DNA, 22 bp, Artificial Sequence
  Target HLA Sequence complement
cgcagtttcttttctccctctc

SEQ ID NO: 11964 - DNA, 22 bp, Artificial Sequence
  Target HLA Sequence complement
gcagtttcttttctccctctcc

SEQ ID NO: 11965 - DNA, 22 bp, Artificial Sequence
  Target HLA Sequence complement
cagtttcttttctccctctccc

SEQ ID NO: 11966 - DNA, 22 bp, Artificial Sequence
  Target HLA Sequence complement
agtttcttttctccctctccca

SEQ ID NO: 11967 - DNA, 22 bp, Artificial Sequence
  Target HLA Sequence complement
gtttcttttctccctctcccaa

SEQ ID NO: 11968 - DNA, 22 bp, Artificial Sequence
  Target HLA Sequence complement
tttcttttctccctctcccaac

SEQ ID NO: 11969 - DNA, 22 bp, Artificial Sequence
  Target HLA Sequence complement
ttcttttctccctctcccaacc

SEQ ID NO: 11970 - DNA, 22 bp, Artificial Sequence
  Target HLA Sequence complement
tcttttctccctctcccaacct

SEQ ID NO: 11971 - DNA, 22 bp, Artificial Sequence
  Target HLA Sequence complement
cttttctccctctcccaaccta

SEQ ID NO: 11972 - DNA, 22 bp, Artificial Sequence
  Target HLA Sequence complement
ttttctccctctcccaacctat

SEQ ID NO: 11973 - DNA, 22 bp, Artificial Sequence
  Target HLA Sequence complement
accgggactcagattctcccca

SEQ ID NO: 11974 - DNA, 22 bp, Artificial Sequence
  Target HLA Sequence complement
cgggactcagattctccccaga

SEQ ID NO: 11975 - DNA, 22 bp, Artificial Sequence
  Target HLA Sequence complement
gggactcagattctccccagac

SEQ ID NO: 11976 - DNA, 22 bp, Artificial Sequence
  Target HLA Sequence complement
ggactcagattctccccagacg

SEQ ID NO: 11977 - DNA, 22 bp, Artificial Sequence
  Target HLA Sequence complement
gactcagattctccccagacgc

SEQ ID NO: 11978 - DNA, 22 bp, Artificial Sequence
  Target HLA Sequence complement
actcagattctccccagacgcc

SEQ ID NO: 11979 - DNA, 22 bp, Artificial Sequence
  Target HLA Sequence complement
tcagattctccccagacgccga

SEQ ID NO: 11980 - DNA, 22 bp, Artificial Sequence
  Target HLA Sequence complement
attctccccagacgccgaggat

SEQ ID NO: 11981 - DNA, 22 bp, Artificial Sequence
  Target HLA Sequence complement
ggagtattgggacggggagaca

SEQ ID NO: 11982 - DNA, 22 bp, Artificial Sequence
  Target HLA Sequence complement
gagtattgggacggggagacac

SEQ ID NO: 11983 - DNA, 22 bp, Artificial Sequence
  Target HLA Sequence complement
agtattgggacggggagacacg

SEQ ID NO: 11984 - DNA, 22 bp, Artificial Sequence
  Target HLA Sequence complement
tattgggacggggagacacgga

SEQ ID NO: 11985 - DNA, 22 bp, Artificial Sequence
  Target HLA Sequence complement
attgggacggggagacacggaa

SEQ ID NO: 11986 - DNA, 22 bp, Artificial Sequence
  Target HLA Sequence complement
ttgggacggggagacacggaaa

SEQ ID NO: 11987 - DNA, 22 bp, Artificial Sequence
  Target HLA Sequence complement
gacggggagacacggaaagtga

SEQ ID NO: 11988 - DNA, 22 bp, Artificial Sequence
  Target HLA Sequence complement
acggggagacacggaaagtgaa

SEQ ID NO: 11989 - DNA, 22 bp, Artificial Sequence
  Target HLA Sequence complement
cggggagacacggaaagtgaag

SEQ ID NO: 11990 - DNA, 22 bp, Artificial Sequence
  Target HLA Sequence complement
ggggagacacggaaagtgaagg

SEQ ID NO: 11991 - DNA, 22 bp, Artificial Sequence
  Target HLA Sequence complement
ctgcgcggctactacaaccaga

SEQ ID NO: 11992 - DNA, 22 bp, Artificial Sequence
  Target HLA Sequence complement
tgcgcggctactacaaccagag

SEQ ID NO: 11993 - DNA, 22 bp, Artificial Sequence
  Target HLA Sequence complement
atgtatggctgcgacgtggggt

SEQ ID NO: 11994 - DNA, 22 bp, Artificial Sequence
  Target HLA Sequence complement
acggacgcccccaaaacgcata

SEQ ID NO: 11995 - DNA, 22 bp, Artificial Sequence
  Target HLA Sequence complement
cggacgcccccaaaacgcatat

SEQ ID NO: 11996 - DNA, 22 bp, Artificial Sequence
  Target HLA Sequence complement
ggacgcccccaaaacgcatatg

SEQ ID NO: 11997 - DNA, 22 bp, Artificial Sequence
  Target HLA Sequence complement
gacgcccccaaaacgcatatga

SEQ ID NO: 11998 - DNA, 22 bp, Artificial Sequence
  Target HLA Sequence complement
acgcccccaaaacgcatatgac

SEQ ID NO: 11999 - DNA, 22 bp, Artificial Sequence
  Target HLA Sequence complement
cgcccccaaaacgcatatgact

SEQ ID NO: 12000 - DNA, 22 bp, Artificial Sequence
  Target HLA Sequence complement
gcccccaaaacgcatatgactc

SEQ ID NO: 12001 - DNA, 22 bp, Artificial Sequence
  Target HLA Sequence complement
cccccaaaacgcatatgactca

SEQ ID NO: 12002 - DNA, 22 bp, Artificial Sequence
  Target HLA Sequence complement
ccccaaaacgcatatgactcac

SEQ ID NO: 12003 - DNA, 22 bp, Artificial Sequence
  Target HLA Sequence complement
cccaaaacgcatatgactcacc

SEQ ID NO: 12004 - DNA, 22 bp, Artificial Sequence
  Target HLA Sequence complement
ccaaaacgcatatgactcacca

SEQ ID NO: 12005 - DNA, 22 bp, Artificial Sequence
  Target HLA Sequence complement
caaaacgcatatgactcaccac

SEQ ID NO: 12006 - DNA, 22 bp, Artificial Sequence
  Target HLA Sequence complement
aaaacgcatatgactcaccacg

SEQ ID NO: 12007 - DNA, 22 bp, Artificial Sequence
  Target HLA Sequence complement
ctgcaggggatggaaccttcca

SEQ ID NO: 12008 - DNA, 22 bp, Artificial Sequence
  Target HLA Sequence complement
tgcaggggatggaaccttccag

SEQ ID NO: 12009 - DNA, 22 bp, Artificial Sequence
  Target HLA Sequence complement
gcaggggatggaaccttccaga

SEQ ID NO: 12010 - DNA, 22 bp, Artificial Sequence
  Target HLA Sequence complement
caggggatggaaccttccagaa

SEQ ID NO: 12011 - DNA, 22 bp, Artificial Sequence
  Target HLA Sequence complement
aggggatggaaccttccagaag

SEQ ID NO: 12012 - DNA, 22 bp, Artificial Sequence
  Target HLA Sequence complement
ggggatggaaccttccagaagt

SEQ ID NO: 12013 - DNA, 22 bp, Artificial Sequence
  Target HLA Sequence complement
aaccttccagaagtgggcggct

SEQ ID NO: 12014 - DNA, 22 bp, Artificial Sequence
  Target HLA Sequence complement
atgagggtttgcccaagcccct

SEQ ID NO: 12015 - DNA, 22 bp, Artificial Sequence
  Target HLA Sequence complement
accatccccatcgtgggcatca

SEQ ID NO: 12016 - DNA, 22 bp, Artificial Sequence
  Target HLA Sequence complement
ccatccccatcgtgggcatcat

SEQ ID NO: 12017 - DNA, 22 bp, Artificial Sequence
  Target HLA Sequence complement
catccccatcgtgggcatcatt

SEQ ID NO: 12018 - DNA, 22 bp, Artificial Sequence
  Target HLA Sequence complement
atccccatcgtgggcatcattg

SEQ ID NO: 12019 - DNA, 22 bp, Artificial Sequence
  Target HLA Sequence complement
tccccatcgtgggcatcattgc

SEQ ID NO: 12020 - DNA, 22 bp, Artificial Sequence
  Target HLA Sequence complement
ccccatcgtgggcatcattgct

SEQ ID NO: 12021 - DNA, 22 bp, Artificial Sequence
  Target HLA Sequence complement
gaggaagagctcagatagaaaa

SEQ ID NO: 12022 - DNA, 22 bp, Artificial Sequence
  Target HLA Sequence complement
aggaagagctcagatagaaaag

SEQ ID NO: 12023 - DNA, 22 bp, Artificial Sequence
  Target HLA Sequence complement
ggaagagctcagatagaaaagg

SEQ ID NO: 12024 - DNA, 22 bp, Artificial Sequence
  Target HLA Sequence complement
gaagagctcagatagaaaagga

SEQ ID NO: 12025 - DNA, 22 bp, Artificial Sequence
  Target HLA Sequence complement
aagagctcagatagaaaaggag

SEQ ID NO: 12026 - DNA, 22 bp, Artificial Sequence
  Target HLA Sequence complement
agagctcagatagaaaaggagg

SEQ ID NO: 12027 - DNA, 22 bp, Artificial Sequence
  Target HLA Sequence complement
gagctcagatagaaaaggaggg

SEQ ID NO: 12028 - DNA, 22 bp, Artificial Sequence
  Target HLA Sequence complement
agctcagatagaaaaggaggga

SEQ ID NO: 12029 - DNA, 22 bp, Artificial Sequence
  Target HLA Sequence complement
gctcagatagaaaaggagggag

SEQ ID NO: 12030 - DNA, 22 bp, Artificial Sequence
  Target HLA Sequence complement
ctcagatagaaaaggagggagc

SEQ ID NO: 12031 - DNA, 22 bp, Artificial Sequence
  Target HLA Sequence complement
tcagatagaaaaggagggagct

SEQ ID NO: 12032 - DNA, 22 bp, Artificial Sequence
  Target HLA Sequence complement
cagatagaaaaggagggagcta

SEQ ID NO: 12033 - DNA, 22 bp, Artificial Sequence
  Target HLA Sequence complement
agatagaaaaggagggagctac

SEQ ID NO: 12034 - DNA, 22 bp, Artificial Sequence
  Target HLA Sequence complement
gatagaaaaggagggagctact

SEQ ID NO: 12035 - DNA, 22 bp, Artificial Sequence
  Target HLA Sequence complement
atagaaaaggagggagctactc

SEQ ID NO: 12036 - DNA, 22 bp, Artificial Sequence
  Target HLA Sequence complement
tagaaaaggagggagctactct

SEQ ID NO: 12037 - DNA, 22 bp, Artificial Sequence
  Target HLA Sequence complement
agaaaaggagggagctactctc

SEQ ID NO: 12038 - DNA, 22 bp, Artificial Sequence
  Target HLA Sequence complement
gaaaaggagggagctactctca

SEQ ID NO: 12039 - DNA, 22 bp, Artificial Sequence
  Target HLA Sequence complement
aaaaggagggagctactctcag

SEQ ID NO: 12040 - DNA, 22 bp, Artificial Sequence
  Target HLA Sequence complement
ggcataatgtgaggaggtgggg

SEQ ID NO: 12041 - DNA, 22 bp, Artificial Sequence
  Target HLA Sequence complement
gcataatgtgaggaggtgggga

SEQ ID NO: 12042 - DNA, 22 bp, Artificial Sequence
  Target HLA Sequence complement
cataatgtgaggaggtggggag

SEQ ID NO: 12043 - DNA, 22 bp, Artificial Sequence
  Target HLA Sequence complement
ataatgtgaggaggtggggaga

SEQ ID NO: 12044 - DNA, 22 bp, Artificial Sequence
  Target HLA Sequence complement
taatgtgaggaggtggggagac

SEQ ID NO: 12045 - DNA, 22 bp, Artificial Sequence
  Target HLA Sequence complement
aatgtgaggaggtggggagacc

SEQ ID NO: 12046 - DNA, 22 bp, Artificial Sequence
  Target HLA Sequence complement
atgtgaggaggtggggagacca

SEQ ID NO: 12047 - DNA, 22 bp, Artificial Sequence
  Target HLA Sequence complement
tgacctgtgctccctccccaat

SEQ ID NO: 12048 - DNA, 22 bp, Artificial Sequence
  Target HLA Sequence complement
acctgtgctccctccccaatca

SEQ ID NO: 12049 - DNA, 22 bp, Artificial Sequence
  Target HLA Sequence complement
cctgtgctccctccccaatcat

SEQ ID NO: 12050 - DNA, 22 bp, Artificial Sequence
  Target HLA Sequence complement
ctgtgctccctccccaatcatc

SEQ ID NO: 12051 - DNA, 22 bp, Artificial Sequence
  Target HLA Sequence complement
tgtgctccctccccaatcatct

SEQ ID NO: 12052 - DNA, 22 bp, Artificial Sequence
  Target HLA Sequence complement
gtgctccctccccaatcatctt

SEQ ID NO: 12053 - DNA, 22 bp, Artificial Sequence
  Target HLA Sequence complement
tgctccctccccaatcatcttt

SEQ ID NO: 12054 - DNA, 22 bp, Artificial Sequence
  Target HLA Sequence complement
gctccctccccaatcatctttc

SEQ ID NO: 12055 - DNA, 22 bp, Artificial Sequence
  Target HLA Sequence complement
ctccctccccaatcatctttcc

SEQ ID NO: 12056 - DNA, 22 bp, Artificial Sequence
  Target HLA Sequence complement
tccctccccaatcatctttcct

SEQ ID NO: 12057 - DNA, 22 bp, Artificial Sequence
  Target HLA Sequence complement
ccctccccaatcatctttcctg

SEQ ID NO: 12058 - DNA, 22 bp, Artificial Sequence
  Target HLA Sequence complement
cctccccaatcatctttcctgt

SEQ ID NO: 12059 - DNA, 22 bp, Artificial Sequence
  Target HLA Sequence complement
ctccccaatcatctttcctgtt

SEQ ID NO: 12060 - DNA, 22 bp, Artificial Sequence
  Target HLA Sequence complement
tccccaatcatctttcctgttc

SEQ ID NO: 12061 - DNA, 22 bp, Artificial Sequence
  Target HLA Sequence complement
ccccaatcatctttcctgttcc

SEQ ID NO: 12062 - DNA, 22 bp, Artificial Sequence
  Target HLA Sequence complement
ttcctgttccagagaggtgggg

SEQ ID NO: 12063 - DNA, 22 bp, Artificial Sequence
  Target HLA Sequence complement
tgttccagagaggtggggctga

SEQ ID NO: 12064 - DNA, 22 bp, Artificial Sequence
  Target HLA Sequence complement
tggggctgaggtgtctccatct

SEQ ID NO: 12065 - DNA, 20 bp, Artificial Sequence
  Target HLA Sequence complement
ttcttccttccctattaaaa

SEQ ID NO: 12066 - DNA, 22 bp, Artificial Sequence
  Target HLA Sequence complement
acttcttccttccctattaaaa

SEQ ID NO: 12067 - DNA, 18 bp, Artificial Sequence
  Target HLA Sequence complement
cagaagcagaggggtcag

SEQ ID NO: 12068 - DNA, 18 bp, Artificial Sequence
  Target HLA Sequence complement
aagcagaggggtcagggc

SEQ ID NO: 12069 - DNA, 18 bp, Artificial Sequence
  Target HLA Sequence complement
agcagaggggtcagggcg

SEQ ID NO: 12070 - DNA, 18 bp, Artificial Sequence
  Target HLA Sequence complement
gcagaggggtcagggcga

SEQ ID NO: 12071 - DNA, 18 bp, Artificial Sequence
  Target HLA Sequence complement
cagaggggtcagggcgaa

SEQ ID NO: 12072 - DNA, 18 bp, Artificial Sequence
  Target HLA Sequence complement
agaggggtcagggcgaag

SEQ ID NO: 12073 - DNA, 18 bp, Artificial Sequence
  Target HLA Sequence complement
gaggggtcagggcgaagt

SEQ ID NO: 12074 - DNA, 18 bp, Artificial Sequence
  Target HLA Sequence complement
aggggtcagggcgaagtc

SEQ ID NO: 12075 - DNA, 18 bp, Artificial Sequence
  Target HLA Sequence complement
ggggtcagggcgaagtcc

SEQ ID NO: 12076 - DNA, 18 bp, Artificial Sequence
  Target HLA Sequence complement
gggtcagggcgaagtccc

SEQ ID NO: 12077 - DNA, 18 bp, Artificial Sequence
  Target HLA Sequence complement
ggtcagggcgaagtccca

SEQ ID NO: 12078 - DNA, 18 bp, Artificial Sequence
  Target HLA Sequence complement
gtcagggcgaagtcccag

SEQ ID NO: 12079 - DNA, 18 bp, Artificial Sequence
  Target HLA Sequence complement
tcagggcgaagtcccagg

SEQ ID NO: 12080 - DNA, 18 bp, Artificial Sequence
  Target HLA Sequence complement
cagggcgaagtcccaggg

SEQ ID NO: 12081 - DNA, 18 bp, Artificial Sequence
  Target HLA Sequence complement
agggcgaagtcccagggc

SEQ ID NO: 12082 - DNA, 18 bp, Artificial Sequence
  Target HLA Sequence complement
gggcgaagtcccagggcc

SEQ ID NO: 12083 - DNA, 18 bp, Artificial Sequence
  Target HLA Sequence complement
ggcgaagtcccagggccc

SEQ ID NO: 12084 - DNA, 18 bp, Artificial Sequence
  Target HLA Sequence complement
gcgaagtcccagggcccc

SEQ ID NO: 12085 - DNA, 18 bp, Artificial Sequence
  Target HLA Sequence complement
cgaagtcccagggcccca

SEQ ID NO: 12086 - DNA, 18 bp, Artificial Sequence
  Target HLA Sequence complement
gaagtcccagggccccag

SEQ ID NO: 12087 - DNA, 18 bp, Artificial Sequence
  Target HLA Sequence complement
aagtcccagggccccagg

SEQ ID NO: 12088 - DNA, 18 bp, Artificial Sequence
  Target HLA Sequence complement
agtcccagggccccaggc

SEQ ID NO: 12089 - DNA, 18 bp, Artificial Sequence
  Target HLA Sequence complement
gtcccagggccccaggcg

SEQ ID NO: 12090 - DNA, 18 bp, Artificial Sequence
  Target HLA Sequence complement
tcccagggccccaggcgt

SEQ ID NO: 12091 - DNA, 18 bp, Artificial Sequence
  Target HLA Sequence complement
cccagggccccaggcgtg

SEQ ID NO: 12092 - DNA, 18 bp, Artificial Sequence
  Target HLA Sequence complement
ccagggccccaggcgtgg

SEQ ID NO: 12093 - DNA, 18 bp, Artificial Sequence
  Target HLA Sequence complement
cagggccccaggcgtggc

SEQ ID NO: 12094 - DNA, 18 bp, Artificial Sequence
  Target HLA Sequence complement
agggccccaggcgtggct

SEQ ID NO: 12095 - DNA, 18 bp, Artificial Sequence
  Target HLA Sequence complement
gggccccaggcgtggctc

SEQ ID NO: 12096 - DNA, 18 bp, Artificial Sequence
  Target HLA Sequence complement
ggccccaggcgtggctct

SEQ ID NO: 12097 - DNA, 18 bp, Artificial Sequence
  Target HLA Sequence complement
gccccaggcgtggctctc

SEQ ID NO: 12098 - DNA, 18 bp, Artificial Sequence
  Target HLA Sequence complement
ccccaggcgtggctctca

SEQ ID NO: 12099 - DNA, 18 bp, Artificial Sequence
  Target HLA Sequence complement
cccaggcgtggctctcag

SEQ ID NO: 12100 - DNA, 18 bp, Artificial Sequence
  Target HLA Sequence complement
ccaggcgtggctctcagg

SEQ ID NO: 12101 - DNA, 18 bp, Artificial Sequence
  Target HLA Sequence complement
caggcgtggctctcaggg

SEQ ID NO: 12102 - DNA, 18 bp, Artificial Sequence
  Target HLA Sequence complement
aggcgtggctctcagggt

SEQ ID NO: 12103 - DNA, 18 bp, Artificial Sequence
  Target HLA Sequence complement
ggcgtggctctcagggtc

SEQ ID NO: 12104 - DNA, 18 bp, Artificial Sequence
  Target HLA Sequence complement
gcgtggctctcagggtct

SEQ ID NO: 12105 - DNA, 18 bp, Artificial Sequence
  Target HLA Sequence complement
cgtggctctcagggtctc

SEQ ID NO: 12106 - DNA, 18 bp, Artificial Sequence
  Target HLA Sequence complement
gtggctctcagggtctca

SEQ ID NO: 12107 - DNA, 18 bp, Artificial Sequence
  Target HLA Sequence complement
tggctctcagggtctcag

SEQ ID NO: 12108 - DNA, 18 bp, Artificial Sequence
  Target HLA Sequence complement
ggctctcagggtctcagg

SEQ ID NO: 12109 - DNA, 18 bp, Artificial Sequence
  Target HLA Sequence complement
gctctcagggtctcaggc

SEQ ID NO: 12110 - DNA, 18 bp, Artificial Sequence
  Target HLA Sequence complement
ctctcagggtctcaggcc

SEQ ID NO: 12111 - DNA, 18 bp, Artificial Sequence
  Target HLA Sequence complement
tctcagggtctcaggccc

SEQ ID NO: 12112 - DNA, 18 bp, Artificial Sequence
  Target HLA Sequence complement
ctcagggtctcaggcccc

SEQ ID NO: 12113 - DNA, 18 bp, Artificial Sequence
  Target HLA Sequence complement
tcagggtctcaggccccg

SEQ ID NO: 12114 - DNA, 18 bp, Artificial Sequence
  Target HLA Sequence complement
cagggtctcaggccccga

SEQ ID NO: 12115 - DNA, 18 bp, Artificial Sequence
  Target HLA Sequence complement
agggtctcaggccccgaa

SEQ ID NO: 12116 - DNA, 18 bp, Artificial Sequence
  Target HLA Sequence complement
gggtctcaggccccgaag

SEQ ID NO: 12117 - DNA, 18 bp, Artificial Sequence
  Target HLA Sequence complement
ggtctcaggccccgaagg

SEQ ID NO: 12118 - DNA, 18 bp, Artificial Sequence
  Target HLA Sequence complement
gtctcaggccccgaaggc

SEQ ID NO: 12119 - DNA, 18 bp, Artificial Sequence
  Target HLA Sequence complement
tctcaggccccgaaggcg

SEQ ID NO: 12120 - DNA, 18 bp, Artificial Sequence
  Target HLA Sequence complement
ctcaggccccgaaggcgg

SEQ ID NO: 12121 - DNA, 18 bp, Artificial Sequence
  Target HLA Sequence complement
tcaggccccgaaggcggt

SEQ ID NO: 12122 - DNA, 18 bp, Artificial Sequence
  Target HLA Sequence complement
caggccccgaaggcggtg

SEQ ID NO: 12123 - DNA, 18 bp, Artificial Sequence
  Target HLA Sequence complement
aggccccgaaggcggtgt

SEQ ID NO: 12124 - DNA, 18 bp, Artificial Sequence
  Target HLA Sequence complement
ggccccgaaggcggtgta

SEQ ID NO: 12125 - DNA, 18 bp, Artificial Sequence
  Target HLA Sequence complement
gccccgaaggcggtgtat

SEQ ID NO: 12126 - DNA, 18 bp, Artificial Sequence
  Target HLA Sequence complement
ccccgaaggcggtgtatg

SEQ ID NO: 12127 - DNA, 18 bp, Artificial Sequence
  Target HLA Sequence complement
cccgaaggcggtgtatgg

SEQ ID NO: 12128 - DNA, 18 bp, Artificial Sequence
  Target HLA Sequence complement
ccgaaggcggtgtatgga

SEQ ID NO: 12129 - DNA, 18 bp, Artificial Sequence
  Target HLA Sequence complement
ggcggtgtatggattggg

SEQ ID NO: 12130 - DNA, 18 bp, Artificial Sequence
  Target HLA Sequence complement
attggggagtcccagcct

SEQ ID NO: 12131 - DNA, 18 bp, Artificial Sequence
  Target HLA Sequence complement
ttggggagtcccagcctt

SEQ ID NO: 12132 - DNA, 18 bp, Artificial Sequence
  Target HLA Sequence complement
tcccagccttggggattc

SEQ ID NO: 12133 - DNA, 18 bp, Artificial Sequence
  Target HLA Sequence complement
cccagccttggggattcc

SEQ ID NO: 12134 - DNA, 18 bp, Artificial Sequence
  Target HLA Sequence complement
ccagccttggggattccc

SEQ ID NO: 12135 - DNA, 18 bp, Artificial Sequence
  Target HLA Sequence complement
cagccttggggattcccc

SEQ ID NO: 12136 - DNA, 18 bp, Artificial Sequence
  Target HLA Sequence complement
agccttggggattcccca

SEQ ID NO: 12137 - DNA, 18 bp, Artificial Sequence
  Target HLA Sequence complement
gccttggggattccccaa

SEQ ID NO: 12138 - DNA, 18 bp, Artificial Sequence
  Target HLA Sequence complement
ccttggggattccccaac

SEQ ID NO: 12139 - DNA, 18 bp, Artificial Sequence
  Target HLA Sequence complement
tggggattccccaactcc

SEQ ID NO: 12140 - DNA, 18 bp, Artificial Sequence
  Target HLA Sequence complement
ggggattccccaactccg

SEQ ID NO: 12141 - DNA, 18 bp, Artificial Sequence
  Target HLA Sequence complement
gggattccccaactccgc

SEQ ID NO: 12142 - DNA, 18 bp, Artificial Sequence
  Target HLA Sequence complement
ggattccccaactccgca

SEQ ID NO: 12143 - DNA, 18 bp, Artificial Sequence
  Target HLA Sequence complement
gattccccaactccgcag

SEQ ID NO: 12144 - DNA, 18 bp, Artificial Sequence
  Target HLA Sequence complement
ccccaactccgcagtttc

SEQ ID NO: 12145 - DNA, 18 bp, Artificial Sequence
  Target HLA Sequence complement
cctggatactcacgacgc

SEQ ID NO: 12146 - DNA, 18 bp, Artificial Sequence
  Target HLA Sequence complement
ctggatactcacgacgcg

SEQ ID NO: 12147 - DNA, 18 bp, Artificial Sequence
  Target HLA Sequence complement
tggatactcacgacgcgg

SEQ ID NO: 12148 - DNA, 18 bp, Artificial Sequence
  Target HLA Sequence complement
ggatactcacgacgcgga

SEQ ID NO: 12149 - DNA, 18 bp, Artificial Sequence
  Target HLA Sequence complement
gatactcacgacgcggac

SEQ ID NO: 12150 - DNA, 18 bp, Artificial Sequence
  Target HLA Sequence complement
atactcacgacgcggacc

SEQ ID NO: 12151 - DNA, 18 bp, Artificial Sequence
  Target HLA Sequence complement
tactcacgacgcggaccc

SEQ ID NO: 12152 - DNA, 18 bp, Artificial Sequence
  Target HLA Sequence complement
actcacgacgcggaccca

SEQ ID NO: 12153 - DNA, 18 bp, Artificial Sequence
  Target HLA Sequence complement
ctcacgacgcggacccag

SEQ ID NO: 12154 - DNA, 18 bp, Artificial Sequence
  Target HLA Sequence complement
tcacgacgcggacccagt

SEQ ID NO: 12155 - DNA, 18 bp, Artificial Sequence
  Target HLA Sequence complement
cacgacgcggacccagtt

SEQ ID NO: 12156 - DNA, 18 bp, Artificial Sequence
  Target HLA Sequence complement
acgacgcggacccagttc

SEQ ID NO: 12157 - DNA, 18 bp, Artificial Sequence
  Target HLA Sequence complement
cgacgcggacccagttct

SEQ ID NO: 12158 - DNA, 18 bp, Artificial Sequence
  Target HLA Sequence complement
gacgcggacccagttctc

SEQ ID NO: 12159 - DNA, 18 bp, Artificial Sequence
  Target HLA Sequence complement
acgcggacccagttctca

SEQ ID NO: 12160 - DNA, 18 bp, Artificial Sequence
  Target HLA Sequence complement
cgcggacccagttctcac

SEQ ID NO: 12161 - DNA, 18 bp, Artificial Sequence
  Target HLA Sequence complement
gcggacccagttctcact

SEQ ID NO: 12162 - DNA, 18 bp, Artificial Sequence
  Target HLA Sequence complement
cggacccagttctcactc

SEQ ID NO: 12163 - DNA, 18 bp, Artificial Sequence
  Target HLA Sequence complement
ggacccagttctcactcc

SEQ ID NO: 12164 - DNA, 18 bp, Artificial Sequence
  Target HLA Sequence complement
gacccagttctcactccc

SEQ ID NO: 12165 - DNA, 18 bp, Artificial Sequence
  Target HLA Sequence complement
cactcccattgggtgtcg

SEQ ID NO: 12166 - DNA, 18 bp, Artificial Sequence
  Target HLA Sequence complement
actcccattgggtgtcgg

SEQ ID NO: 12167 - DNA, 18 bp, Artificial Sequence
  Target HLA Sequence complement
ctcccattgggtgtcggg

SEQ ID NO: 12168 - DNA, 18 bp, Artificial Sequence
  Target HLA Sequence complement
tcccattgggtgtcgggt

SEQ ID NO: 12169 - DNA, 18 bp, Artificial Sequence
  Target HLA Sequence complement
cccattgggtgtcgggtt

SEQ ID NO: 12170 - DNA, 18 bp, Artificial Sequence
  Target HLA Sequence complement
tgggtgtcgggtttccag

SEQ ID NO: 12171 - DNA, 18 bp, Artificial Sequence
  Target HLA Sequence complement
gggtgtcgggtttccaga

SEQ ID NO: 12172 - DNA, 18 bp, Artificial Sequence
  Target HLA Sequence complement
ggtgtcgggtttccagag

SEQ ID NO: 12173 - DNA, 18 bp, Artificial Sequence
  Target HLA Sequence complement
cgggtttccagagaagcc

SEQ ID NO: 12174 - DNA, 18 bp, Artificial Sequence
  Target HLA Sequence complement
gccaatcagtgtcgtcgc

SEQ ID NO: 12175 - DNA, 18 bp, Artificial Sequence
  Target HLA Sequence complement
ccaatcagtgtcgtcgcg

SEQ ID NO: 12176 - DNA, 18 bp, Artificial Sequence
  Target HLA Sequence complement
caatcagtgtcgtcgcgg

SEQ ID NO: 12177 - DNA, 18 bp, Artificial Sequence
  Target HLA Sequence complement
atcagtgtcgtcgcggtc

SEQ ID NO: 12178 - DNA, 18 bp, Artificial Sequence
  Target HLA Sequence complement
tcagtgtcgtcgcggtcg

SEQ ID NO: 12179 - DNA, 18 bp, Artificial Sequence
  Target HLA Sequence complement
cagtgtcgtcgcggtcgc

SEQ ID NO: 12180 - DNA, 18 bp, Artificial Sequence
  Target HLA Sequence complement
agtgtcgtcgcggtcgcg

SEQ ID NO: 12181 - DNA, 18 bp, Artificial Sequence
  Target HLA Sequence complement
gtgtcgtcgcggtcgcgg

SEQ ID NO: 12182 - DNA, 18 bp, Artificial Sequence
  Target HLA Sequence complement
tgtcgtcgcggtcgcggt

SEQ ID NO: 12183 - DNA, 18 bp, Artificial Sequence
  Target HLA Sequence complement
gtcgtcgcggtcgcggtt

SEQ ID NO: 12184 - DNA, 18 bp, Artificial Sequence
  Target HLA Sequence complement
tcgtcgcggtcgcggttc

SEQ ID NO: 12185 - DNA, 18 bp, Artificial Sequence
  Target HLA Sequence complement
cgtcgcggtcgcggttct

SEQ ID NO: 12186 - DNA, 18 bp, Artificial Sequence
  Target HLA Sequence complement
gtcgcggtcgcggttcta

SEQ ID NO: 12187 - DNA, 18 bp, Artificial Sequence
  Target HLA Sequence complement
tcgcggtcgcggttctaa

SEQ ID NO: 12188 - DNA, 18 bp, Artificial Sequence
  Target HLA Sequence complement
cgcggtcgcggttctaaa

SEQ ID NO: 12189 - DNA, 18 bp, Artificial Sequence
  Target HLA Sequence complement
gcggtcgcggttctaaag

SEQ ID NO: 12190 - DNA, 18 bp, Artificial Sequence
  Target HLA Sequence complement
cgcggttctaaagtccgc

SEQ ID NO: 12191 - DNA, 18 bp, Artificial Sequence
  Target HLA Sequence complement
ctaaagtccgcacgcacc

SEQ ID NO: 12192 - DNA, 18 bp, Artificial Sequence
  Target HLA Sequence complement
taaagtccgcacgcaccc

SEQ ID NO: 12193 - DNA, 18 bp, Artificial Sequence
  Target HLA Sequence complement
aaagtccgcacgcaccca

SEQ ID NO: 12194 - DNA, 18 bp, Artificial Sequence
  Target HLA Sequence complement
aagtccgcacgcacccac

SEQ ID NO: 12195 - DNA, 18 bp, Artificial Sequence
  Target HLA Sequence complement
agtccgcacgcacccacc

SEQ ID NO: 12196 - DNA, 18 bp, Artificial Sequence
  Target HLA Sequence complement
gtccgcacgcacccaccg

SEQ ID NO: 12197 - DNA, 18 bp, Artificial Sequence
  Target HLA Sequence complement
tccgcacgcacccaccgg

SEQ ID NO: 12198 - DNA, 18 bp, Artificial Sequence
  Target HLA Sequence complement
ccgcacgcacccaccggg

SEQ ID NO: 12199 - DNA, 18 bp, Artificial Sequence
  Target HLA Sequence complement
cgcacgcacccaccggga

SEQ ID NO: 12200 - DNA, 18 bp, Artificial Sequence
  Target HLA Sequence complement
gcacgcacccaccgggac

SEQ ID NO: 12201 - DNA, 18 bp, Artificial Sequence
  Target HLA Sequence complement
cacgcacccaccgggact

SEQ ID NO: 12202 - DNA, 18 bp, Artificial Sequence
  Target HLA Sequence complement
acgcacccaccgggactc

SEQ ID NO: 12203 - DNA, 18 bp, Artificial Sequence
  Target HLA Sequence complement
cgcacccaccgggactca

SEQ ID NO: 12204 - DNA, 18 bp, Artificial Sequence
  Target HLA Sequence complement
gcacccaccgggactcag

SEQ ID NO: 12205 - DNA, 18 bp, Artificial Sequence
  Target HLA Sequence complement
cacccaccgggactcaga

SEQ ID NO: 12206 - DNA, 18 bp, Artificial Sequence
  Target HLA Sequence complement
acccaccgggactcagat

SEQ ID NO: 12207 - DNA, 18 bp, Artificial Sequence
  Target HLA Sequence complement
cccaccgggactcagatt

SEQ ID NO: 12208 - DNA, 18 bp, Artificial Sequence
  Target HLA Sequence complement
ccaccgggactcagattc

SEQ ID NO: 12209 - DNA, 18 bp, Artificial Sequence
  Target HLA Sequence complement
ccgggactcagattctcc

SEQ ID NO: 12210 - DNA, 18 bp, Artificial Sequence
  Target HLA Sequence complement
cgggactcagattctccc

SEQ ID NO: 12211 - DNA, 18 bp, Artificial Sequence
  Target HLA Sequence complement
gggactcagattctcccc

SEQ ID NO: 12212 - DNA, 18 bp, Artificial Sequence
  Target HLA Sequence complement
cagattctccccagacgc

SEQ ID NO: 12213 - DNA, 18 bp, Artificial Sequence
  Target HLA Sequence complement
agattctccccagacgcc

SEQ ID NO: 12214 - DNA, 18 bp, Artificial Sequence
  Target HLA Sequence complement
gattctccccagacgccg

SEQ ID NO: 12215 - DNA, 18 bp, Artificial Sequence
  Target HLA Sequence complement
attctccccagacgccga

SEQ ID NO: 12216 - DNA, 18 bp, Artificial Sequence
  Target HLA Sequence complement
ttctccccagacgccgag

SEQ ID NO: 12217 - DNA, 18 bp, Artificial Sequence
  Target HLA Sequence complement
tctccccagacgccgagg

SEQ ID NO: 12218 - DNA, 18 bp, Artificial Sequence
  Target HLA Sequence complement
ctccccagacgccgagga

SEQ ID NO: 12219 - DNA, 18 bp, Artificial Sequence
  Target HLA Sequence complement
tccccagacgccgaggat

SEQ ID NO: 12220 - DNA, 18 bp, Artificial Sequence
  Target HLA Sequence complement
ccccagacgccgaggatg

SEQ ID NO: 12221 - DNA, 18 bp, Artificial Sequence
  Target HLA Sequence complement
cccagacgccgaggatgg

SEQ ID NO: 12222 - DNA, 18 bp, Artificial Sequence
  Target HLA Sequence complement
ccagacgccgaggatggc

SEQ ID NO: 12223 - DNA, 18 bp, Artificial Sequence
  Target HLA Sequence complement
cagacgccgaggatggcc

SEQ ID NO: 12224 - DNA, 18 bp, Artificial Sequence
  Target HLA Sequence complement
agacgccgaggatggccg

SEQ ID NO: 12225 - DNA, 18 bp, Artificial Sequence
  Target HLA Sequence complement
gacgccgaggatggccgt

SEQ ID NO: 12226 - DNA, 18 bp, Artificial Sequence
  Target HLA Sequence complement
acgccgaggatggccgtc

SEQ ID NO: 12227 - DNA, 18 bp, Artificial Sequence
  Target HLA Sequence complement
cgccgaggatggccgtca

SEQ ID NO: 12228 - DNA, 18 bp, Artificial Sequence
  Target HLA Sequence complement
gccgaggatggccgtcat

SEQ ID NO: 12229 - DNA, 18 bp, Artificial Sequence
  Target HLA Sequence complement
ccgaggatggccgtcatg

SEQ ID NO: 12230 - DNA, 18 bp, Artificial Sequence
  Target HLA Sequence complement
cgaggatggccgtcatgg

SEQ ID NO: 12231 - DNA, 18 bp, Artificial Sequence
  Target HLA Sequence complement
gaggatggccgtcatggc

SEQ ID NO: 12232 - DNA, 18 bp, Artificial Sequence
  Target HLA Sequence complement
aggatggccgtcatggcg

SEQ ID NO: 12233 - DNA, 18 bp, Artificial Sequence
  Target HLA Sequence complement
ggatggccgtcatggcgc

SEQ ID NO: 12234 - DNA, 18 bp, Artificial Sequence
  Target HLA Sequence complement
gatggccgtcatggcgcc

SEQ ID NO: 12235 - DNA, 18 bp, Artificial Sequence
  Target HLA Sequence complement
atggccgtcatggcgccc

SEQ ID NO: 12236 - DNA, 18 bp, Artificial Sequence
  Target HLA Sequence complement
tggccgtcatggcgcccc

SEQ ID NO: 12237 - DNA, 18 bp, Artificial Sequence
  Target HLA Sequence complement
ggccgtcatggcgccccg

SEQ ID NO: 12238 - DNA, 18 bp, Artificial Sequence
  Target HLA Sequence complement
gccgtcatggcgccccga

SEQ ID NO: 12239 - DNA, 18 bp, Artificial Sequence
  Target HLA Sequence complement
ccgtcatggcgccccgaa

SEQ ID NO: 12240 - DNA, 18 bp, Artificial Sequence
  Target HLA Sequence complement
cgtcatggcgccccgaac

SEQ ID NO: 12241 - DNA, 18 bp, Artificial Sequence
  Target HLA Sequence complement
gtcatggcgccccgaacc

SEQ ID NO: 12242 - DNA, 18 bp, Artificial Sequence
  Target HLA Sequence complement
tcatggcgccccgaaccc

SEQ ID NO: 12243 - DNA, 18 bp, Artificial Sequence
  Target HLA Sequence complement
catggcgccccgaaccct

SEQ ID NO: 12244 - DNA, 18 bp, Artificial Sequence
  Target HLA Sequence complement
atggcgccccgaaccctc

SEQ ID NO: 12245 - DNA, 18 bp, Artificial Sequence
  Target HLA Sequence complement
tggcgccccgaaccctcg

SEQ ID NO: 12246 - DNA, 18 bp, Artificial Sequence
  Target HLA Sequence complement
ggcgccccgaaccctcgt

SEQ ID NO: 12247 - DNA, 18 bp, Artificial Sequence
  Target HLA Sequence complement
gcgccccgaaccctcgtc

SEQ ID NO: 12248 - DNA, 18 bp, Artificial Sequence
  Target HLA Sequence complement
cgccccgaaccctcgtcc

SEQ ID NO: 12249 - DNA, 18 bp, Artificial Sequence
  Target HLA Sequence complement
gccccgaaccctcgtcct

SEQ ID NO: 12250 - DNA, 18 bp, Artificial Sequence
  Target HLA Sequence complement
ccccgaaccctcgtcctg

SEQ ID NO: 12251 - DNA, 18 bp, Artificial Sequence
  Target HLA Sequence complement
cccgaaccctcgtcctgc

SEQ ID NO: 12252 - DNA, 18 bp, Artificial Sequence
  Target HLA Sequence complement
ccgaaccctcgtcctgct

SEQ ID NO: 12253 - DNA, 18 bp, Artificial Sequence
  Target HLA Sequence complement
cgaaccctcgtcctgcta

SEQ ID NO: 12254 - DNA, 18 bp, Artificial Sequence
  Target HLA Sequence complement
gaaccctcgtcctgctac

SEQ ID NO: 12255 - DNA, 18 bp, Artificial Sequence
  Target HLA Sequence complement
accctcgtcctgctactc

SEQ ID NO: 12256 - DNA, 18 bp, Artificial Sequence
  Target HLA Sequence complement
ccctcgtcctgctactct

SEQ ID NO: 12257 - DNA, 18 bp, Artificial Sequence
  Target HLA Sequence complement
cctcgtcctgctactctc

SEQ ID NO: 12258 - DNA, 18 bp, Artificial Sequence
  Target HLA Sequence complement
ctcgtcctgctactctcg

SEQ ID NO: 12259 - DNA, 18 bp, Artificial Sequence
  Target HLA Sequence complement
tcgtcctgctactctcgg

SEQ ID NO: 12260 - DNA, 18 bp, Artificial Sequence
  Target HLA Sequence complement
cgtcctgctactctcggg

SEQ ID NO: 12261 - DNA, 18 bp, Artificial Sequence
  Target HLA Sequence complement
gtcctgctactctcgggg

SEQ ID NO: 12262 - DNA, 18 bp, Artificial Sequence
  Target HLA Sequence complement
tcctgctactctcggggg

SEQ ID NO: 12263 - DNA, 18 bp, Artificial Sequence
  Target HLA Sequence complement
cctgctactctcgggggc

SEQ ID NO: 12264 - DNA, 18 bp, Artificial Sequence
  Target HLA Sequence complement
ctgctactctcgggggct

SEQ ID NO: 12265 - DNA, 18 bp, Artificial Sequence
  Target HLA Sequence complement
tgctactctcgggggctc

SEQ ID NO: 12266 - DNA, 18 bp, Artificial Sequence
  Target HLA Sequence complement
gctactctcgggggctct

SEQ ID NO: 12267 - DNA, 18 bp, Artificial Sequence
  Target HLA Sequence complement
ctactctcgggggctctg

SEQ ID NO: 12268 - DNA, 18 bp, Artificial Sequence
  Target HLA Sequence complement
tactctcgggggctctgg

SEQ ID NO: 12269 - DNA, 18 bp, Artificial Sequence
  Target HLA Sequence complement
actctcgggggctctggc

SEQ ID NO: 12270 - DNA, 18 bp, Artificial Sequence
  Target HLA Sequence complement
ctctcgggggctctggcc

SEQ ID NO: 12271 - DNA, 18 bp, Artificial Sequence
  Target HLA Sequence complement
tctcgggggctctggccc

SEQ ID NO: 12272 - DNA, 18 bp, Artificial Sequence
  Target HLA Sequence complement
ctcgggggctctggccct

SEQ ID NO: 12273 - DNA, 18 bp, Artificial Sequence
  Target HLA Sequence complement
tcgggggctctggccctg

SEQ ID NO: 12274 - DNA, 18 bp, Artificial Sequence
  Target HLA Sequence complement
cgggggctctggccctga

SEQ ID NO: 12275 - DNA, 18 bp, Artificial Sequence
  Target HLA Sequence complement
gggggctctggccctgac

SEQ ID NO: 12276 - DNA, 18 bp, Artificial Sequence
  Target HLA Sequence complement
ggggctctggccctgacc

SEQ ID NO: 12277 - DNA, 18 bp, Artificial Sequence
  Target HLA Sequence complement
gggctctggccctgaccc

SEQ ID NO: 12278 - DNA, 18 bp, Artificial Sequence
  Target HLA Sequence complement
ggctctggccctgaccca

SEQ ID NO: 12279 - DNA, 18 bp, Artificial Sequence
  Target HLA Sequence complement
gctctggccctgacccag

SEQ ID NO: 12280 - DNA, 18 bp, Artificial Sequence
  Target HLA Sequence complement
ctctggccctgacccaga

SEQ ID NO: 12281 - DNA, 18 bp, Artificial Sequence
  Target HLA Sequence complement
tctggccctgacccagac

SEQ ID NO: 12282 - DNA, 18 bp, Artificial Sequence
  Target HLA Sequence complement
ctggccctgacccagacc

SEQ ID NO: 12283 - DNA, 18 bp, Artificial Sequence
  Target HLA Sequence complement
tggccctgacccagacct

SEQ ID NO: 12284 - DNA, 18 bp, Artificial Sequence
  Target HLA Sequence complement
ggccctgacccagacctg

SEQ ID NO: 12285 - DNA, 18 bp, Artificial Sequence
  Target HLA Sequence complement
gccctgacccagacctgg

SEQ ID NO: 12286 - DNA, 18 bp, Artificial Sequence
  Target HLA Sequence complement
ccctgacccagacctggg

SEQ ID NO: 12287 - DNA, 18 bp, Artificial Sequence
  Target HLA Sequence complement
cctgacccagacctgggc

SEQ ID NO: 12288 - DNA, 18 bp, Artificial Sequence
  Target HLA Sequence complement
ctgacccagacctgggcg

SEQ ID NO: 12289 - DNA, 18 bp, Artificial Sequence
  Target HLA Sequence complement
tgacccagacctgggcgg

SEQ ID NO: 12290 - DNA, 18 bp, Artificial Sequence
  Target HLA Sequence complement
gacccagacctgggcggg

SEQ ID NO: 12291 - DNA, 18 bp, Artificial Sequence
  Target HLA Sequence complement
acccagacctgggcgggc

SEQ ID NO: 12292 - DNA, 18 bp, Artificial Sequence
  Target HLA Sequence complement
cccagacctgggcgggct

SEQ ID NO: 12293 - DNA, 18 bp, Artificial Sequence
  Target HLA Sequence complement
ccagacctgggcgggctc

SEQ ID NO: 12294 - DNA, 18 bp, Artificial Sequence
  Target HLA Sequence complement
cagacctgggcgggctct

SEQ ID NO: 12295 - DNA, 18 bp, Artificial Sequence
  Target HLA Sequence complement
agacctgggcgggctctc

SEQ ID NO: 12296 - DNA, 18 bp, Artificial Sequence
  Target HLA Sequence complement
gacctgggcgggctctca

SEQ ID NO: 12297 - DNA, 18 bp, Artificial Sequence
  Target HLA Sequence complement
acctgggcgggctctcac

SEQ ID NO: 12298 - DNA, 18 bp, Artificial Sequence
  Target HLA Sequence complement
cctgggcgggctctcact

SEQ ID NO: 12299 - DNA, 18 bp, Artificial Sequence
  Target HLA Sequence complement
ctgggcgggctctcactc

SEQ ID NO: 12300 - DNA, 18 bp, Artificial Sequence
  Target HLA Sequence complement
tgggcgggctctcactcc

SEQ ID NO: 12301 - DNA, 18 bp, Artificial Sequence
  Target HLA Sequence complement
gggcgggctctcactcca

SEQ ID NO: 12302 - DNA, 18 bp, Artificial Sequence
  Target HLA Sequence complement
ggcgggctctcactccat

SEQ ID NO: 12303 - DNA, 18 bp, Artificial Sequence
  Target HLA Sequence complement
gcgggctctcactccatg

SEQ ID NO: 12304 - DNA, 18 bp, Artificial Sequence
  Target HLA Sequence complement
cgggctctcactccatga

SEQ ID NO: 12305 - DNA, 18 bp, Artificial Sequence
  Target HLA Sequence complement
gggctctcactccatgag

SEQ ID NO: 12306 - DNA, 18 bp, Artificial Sequence
  Target HLA Sequence complement
ggctctcactccatgagg

SEQ ID NO: 12307 - DNA, 18 bp, Artificial Sequence
  Target HLA Sequence complement
cttcacatccgtgtcccg

SEQ ID NO: 12308 - DNA, 18 bp, Artificial Sequence
  Target HLA Sequence complement
ttcacatccgtgtcccgg

SEQ ID NO: 12309 - DNA, 18 bp, Artificial Sequence
  Target HLA Sequence complement
tcacatccgtgtcccggc

SEQ ID NO: 12310 - DNA, 18 bp, Artificial Sequence
  Target HLA Sequence complement
cacatccgtgtcccggcc

SEQ ID NO: 12311 - DNA, 18 bp, Artificial Sequence
  Target HLA Sequence complement
acatccgtgtcccggccc

SEQ ID NO: 12312 - DNA, 18 bp, Artificial Sequence
  Target HLA Sequence complement
catccgtgtcccggcccg

SEQ ID NO: 12313 - DNA, 18 bp, Artificial Sequence
  Target HLA Sequence complement
atccgtgtcccggcccgg

SEQ ID NO: 12314 - DNA, 18 bp, Artificial Sequence
  Target HLA Sequence complement
tccgtgtcccggcccggc

SEQ ID NO: 12315 - DNA, 18 bp, Artificial Sequence
  Target HLA Sequence complement
ccgtgtcccggcccggcc

SEQ ID NO: 12316 - DNA, 18 bp, Artificial Sequence
  Target HLA Sequence complement
cgtgtcccggcccggccg

SEQ ID NO: 12317 - DNA, 18 bp, Artificial Sequence
  Target HLA Sequence complement
gtgtcccggcccggccgc

SEQ ID NO: 12318 - DNA, 18 bp, Artificial Sequence
  Target HLA Sequence complement
tgtcccggcccggccgcg

SEQ ID NO: 12319 - DNA, 18 bp, Artificial Sequence
  Target HLA Sequence complement
gtcccggcccggccgcgg

SEQ ID NO: 12320 - DNA, 18 bp, Artificial Sequence
  Target HLA Sequence complement
tcccggcccggccgcggg

SEQ ID NO: 12321 - DNA, 18 bp, Artificial Sequence
  Target HLA Sequence complement
cccggcccggccgcgggg

SEQ ID NO: 12322 - DNA, 18 bp, Artificial Sequence
  Target HLA Sequence complement
ccggcccggccgcgggga

SEQ ID NO: 12323 - DNA, 18 bp, Artificial Sequence
  Target HLA Sequence complement
cggcccggccgcggggag

SEQ ID NO: 12324 - DNA, 18 bp, Artificial Sequence
  Target HLA Sequence complement
ggcccggccgcggggagc

SEQ ID NO: 12325 - DNA, 18 bp, Artificial Sequence
  Target HLA Sequence complement
gcccggccgcggggagcc

SEQ ID NO: 12326 - DNA, 18 bp, Artificial Sequence
  Target HLA Sequence complement
cccggccgcggggagccc

SEQ ID NO: 12327 - DNA, 18 bp, Artificial Sequence
  Target HLA Sequence complement
ccggccgcggggagcccc

SEQ ID NO: 12328 - DNA, 18 bp, Artificial Sequence
  Target HLA Sequence complement
cggccgcggggagccccg

SEQ ID NO: 12329 - DNA, 18 bp, Artificial Sequence
  Target HLA Sequence complement
ggccgcggggagccccgc

SEQ ID NO: 12330 - DNA, 18 bp, Artificial Sequence
  Target HLA Sequence complement
gccgcggggagccccgct

SEQ ID NO: 12331 - DNA, 18 bp, Artificial Sequence
  Target HLA Sequence complement
ccgcggggagccccgctt

SEQ ID NO: 12332 - DNA, 18 bp, Artificial Sequence
  Target HLA Sequence complement
cgcggggagccccgcttc

SEQ ID NO: 12333 - DNA, 18 bp, Artificial Sequence
  Target HLA Sequence complement
gcggggagccccgcttca

SEQ ID NO: 12334 - DNA, 18 bp, Artificial Sequence
  Target HLA Sequence complement
cggggagccccgcttcat

SEQ ID NO: 12335 - DNA, 18 bp, Artificial Sequence
  Target HLA Sequence complement
ggggagccccgcttcatc

SEQ ID NO: 12336 - DNA, 18 bp, Artificial Sequence
  Target HLA Sequence complement
gggagccccgcttcatcg

SEQ ID NO: 12337 - DNA, 18 bp, Artificial Sequence
  Target HLA Sequence complement
ggagccccgcttcatcgc

SEQ ID NO: 12338 - DNA, 18 bp, Artificial Sequence
  Target HLA Sequence complement
gagccccgcttcatcgca

SEQ ID NO: 12339 - DNA, 18 bp, Artificial Sequence
  Target HLA Sequence complement
agccccgcttcatcgcag

SEQ ID NO: 12340 - DNA, 18 bp, Artificial Sequence
  Target HLA Sequence complement
gccccgcttcatcgcagt

SEQ ID NO: 12341 - DNA, 18 bp, Artificial Sequence
  Target HLA Sequence complement
ccccgcttcatcgcagtg

SEQ ID NO: 12342 - DNA, 18 bp, Artificial Sequence
  Target HLA Sequence complement
cccgcttcatcgcagtgg

SEQ ID NO: 12343 - DNA, 18 bp, Artificial Sequence
  Target HLA Sequence complement
ccgcttcatcgcagtggg

SEQ ID NO: 12344 - DNA, 18 bp, Artificial Sequence
  Target HLA Sequence complement
cgcttcatcgcagtgggc

SEQ ID NO: 12345 - DNA, 18 bp, Artificial Sequence
  Target HLA Sequence complement
gcttcatcgcagtgggct

SEQ ID NO: 12346 - DNA, 18 bp, Artificial Sequence
  Target HLA Sequence complement
tcatcgcagtgggctacg

SEQ ID NO: 12347 - DNA, 18 bp, Artificial Sequence
  Target HLA Sequence complement
catcgcagtgggctacgt

SEQ ID NO: 12348 - DNA, 18 bp, Artificial Sequence
  Target HLA Sequence complement
atcgcagtgggctacgtg

SEQ ID NO: 12349 - DNA, 18 bp, Artificial Sequence
  Target HLA Sequence complement
tcgcagtgggctacgtgg

SEQ ID NO: 12350 - DNA, 18 bp, Artificial Sequence
  Target HLA Sequence complement
cgcagtgggctacgtgga

SEQ ID NO: 12351 - DNA, 18 bp, Artificial Sequence
  Target HLA Sequence complement
gcagtgggctacgtggac

SEQ ID NO: 12352 - DNA, 18 bp, Artificial Sequence
  Target HLA Sequence complement
cagtgggctacgtggacg

SEQ ID NO: 12353 - DNA, 18 bp, Artificial Sequence
  Target HLA Sequence complement
agtgggctacgtggacga

SEQ ID NO: 12354 - DNA, 18 bp, Artificial Sequence
  Target HLA Sequence complement
gtgggctacgtggacgac

SEQ ID NO: 12355 - DNA, 18 bp, Artificial Sequence
  Target HLA Sequence complement
tgggctacgtggacgaca

SEQ ID NO: 12356 - DNA, 18 bp, Artificial Sequence
  Target HLA Sequence complement
gggctacgtggacgacac

SEQ ID NO: 12357 - DNA, 18 bp, Artificial Sequence
  Target HLA Sequence complement
ggctacgtggacgacacg

SEQ ID NO: 12358 - DNA, 18 bp, Artificial Sequence
  Target HLA Sequence complement
gctacgtggacgacacgc

SEQ ID NO: 12359 - DNA, 18 bp, Artificial Sequence
  Target HLA Sequence complement
ctacgtggacgacacgca

SEQ ID NO: 12360 - DNA, 18 bp, Artificial Sequence
  Target HLA Sequence complement
tacgtggacgacacgcag

SEQ ID NO: 12361 - DNA, 18 bp, Artificial Sequence
  Target HLA Sequence complement
acgtggacgacacgcagt

SEQ ID NO: 12362 - DNA, 18 bp, Artificial Sequence
  Target HLA Sequence complement
cgtggacgacacgcagtt

SEQ ID NO: 12363 - DNA, 18 bp, Artificial Sequence
  Target HLA Sequence complement
gtggacgacacgcagttc

SEQ ID NO: 12364 - DNA, 18 bp, Artificial Sequence
  Target HLA Sequence complement
tggacgacacgcagttcg

SEQ ID NO: 12365 - DNA, 18 bp, Artificial Sequence
  Target HLA Sequence complement
ggacgacacgcagttcgt

SEQ ID NO: 12366 - DNA, 18 bp, Artificial Sequence
  Target HLA Sequence complement
gacgacacgcagttcgtg

SEQ ID NO: 12367 - DNA, 18 bp, Artificial Sequence
  Target HLA Sequence complement
acgacacgcagttcgtgc

SEQ ID NO: 12368 - DNA, 18 bp, Artificial Sequence
  Target HLA Sequence complement
cgacacgcagttcgtgcg

SEQ ID NO: 12369 - DNA, 18 bp, Artificial Sequence
  Target HLA Sequence complement
gacacgcagttcgtgcgg

SEQ ID NO: 12370 - DNA, 18 bp, Artificial Sequence
  Target HLA Sequence complement
acacgcagttcgtgcggt

SEQ ID NO: 12371 - DNA, 18 bp, Artificial Sequence
  Target HLA Sequence complement
cacgcagttcgtgcggtt

SEQ ID NO: 12372 - DNA, 18 bp, Artificial Sequence
  Target HLA Sequence complement
acgcagttcgtgcggttc

SEQ ID NO: 12373 - DNA, 18 bp, Artificial Sequence
  Target HLA Sequence complement
cgcagttcgtgcggttcg

SEQ ID NO: 12374 - DNA, 18 bp, Artificial Sequence
  Target HLA Sequence complement
gcagttcgtgcggttcga

SEQ ID NO: 12375 - DNA, 18 bp, Artificial Sequence
  Target HLA Sequence complement
cagttcgtgcggttcgac

SEQ ID NO: 12376 - DNA, 18 bp, Artificial Sequence
  Target HLA Sequence complement
gttcgtgcggttcgacag

SEQ ID NO: 12377 - DNA, 18 bp, Artificial Sequence
  Target HLA Sequence complement
ttcgtgcggttcgacagc

SEQ ID NO: 12378 - DNA, 18 bp, Artificial Sequence
  Target HLA Sequence complement
tcgtgcggttcgacagcg

SEQ ID NO: 12379 - DNA, 18 bp, Artificial Sequence
  Target HLA Sequence complement
cgtgcggttcgacagcga

SEQ ID NO: 12380 - DNA, 18 bp, Artificial Sequence
  Target HLA Sequence complement
gtgcggttcgacagcgac

SEQ ID NO: 12381 - DNA, 18 bp, Artificial Sequence
  Target HLA Sequence complement
tgcggttcgacagcgacg

SEQ ID NO: 12382 - DNA, 18 bp, Artificial Sequence
  Target HLA Sequence complement
gcggttcgacagcgacgc

SEQ ID NO: 12383 - DNA, 18 bp, Artificial Sequence
  Target HLA Sequence complement
cggttcgacagcgacgcc

SEQ ID NO: 12384 - DNA, 18 bp, Artificial Sequence
  Target HLA Sequence complement
ggttcgacagcgacgccg

SEQ ID NO: 12385 - DNA, 18 bp, Artificial Sequence
  Target HLA Sequence complement
gttcgacagcgacgccgc

SEQ ID NO: 12386 - DNA, 18 bp, Artificial Sequence
  Target HLA Sequence complement
ttcgacagcgacgccgcg

SEQ ID NO: 12387 - DNA, 18 bp, Artificial Sequence
  Target HLA Sequence complement
tcgacagcgacgccgcga

SEQ ID NO: 12388 - DNA, 18 bp, Artificial Sequence
  Target HLA Sequence complement
cgacagcgacgccgcgag

SEQ ID NO: 12389 - DNA, 18 bp, Artificial Sequence
  Target HLA Sequence complement
gacagcgacgccgcgagc

SEQ ID NO: 12390 - DNA, 18 bp, Artificial Sequence
  Target HLA Sequence complement
acagcgacgccgcgagcc

SEQ ID NO: 12391 - DNA, 18 bp, Artificial Sequence
  Target HLA Sequence complement
cagcgacgccgcgagcca

SEQ ID NO: 12392 - DNA, 18 bp, Artificial Sequence
  Target HLA Sequence complement
agcgacgccgcgagccag

SEQ ID NO: 12393 - DNA, 18 bp, Artificial Sequence
  Target HLA Sequence complement
gcgacgccgcgagccaga

SEQ ID NO: 12394 - DNA, 18 bp, Artificial Sequence
  Target HLA Sequence complement
cgacgccgcgagccagag

SEQ ID NO: 12395 - DNA, 18 bp, Artificial Sequence
  Target HLA Sequence complement
gacgccgcgagccagagg

SEQ ID NO: 12396 - DNA, 18 bp, Artificial Sequence
  Target HLA Sequence complement
acgccgcgagccagagga

SEQ ID NO: 12397 - DNA, 18 bp, Artificial Sequence
  Target HLA Sequence complement
cgccgcgagccagaggat

SEQ ID NO: 12398 - DNA, 18 bp, Artificial Sequence
  Target HLA Sequence complement
gccgcgagccagaggatg

SEQ ID NO: 12399 - DNA, 18 bp, Artificial Sequence
  Target HLA Sequence complement
ccgcgagccagaggatgg

SEQ ID NO: 12400 - DNA, 18 bp, Artificial Sequence
  Target HLA Sequence complement
cgcgagccagaggatgga

SEQ ID NO: 12401 - DNA, 18 bp, Artificial Sequence
  Target HLA Sequence complement
gcgagccagaggatggag

SEQ ID NO: 12402 - DNA, 18 bp, Artificial Sequence
  Target HLA Sequence complement
cgagccagaggatggagc

SEQ ID NO: 12403 - DNA, 18 bp, Artificial Sequence
  Target HLA Sequence complement
gagccagaggatggagcc

SEQ ID NO: 12404 - DNA, 18 bp, Artificial Sequence
  Target HLA Sequence complement
agccagaggatggagccg

SEQ ID NO: 12405 - DNA, 18 bp, Artificial Sequence
  Target HLA Sequence complement
gccagaggatggagccgc

SEQ ID NO: 12406 - DNA, 18 bp, Artificial Sequence
  Target HLA Sequence complement
ccagaggatggagccgcg

SEQ ID NO: 12407 - DNA, 18 bp, Artificial Sequence
  Target HLA Sequence complement
cagaggatggagccgcgg

SEQ ID NO: 12408 - DNA, 18 bp, Artificial Sequence
  Target HLA Sequence complement
agaggatggagccgcggg

SEQ ID NO: 12409 - DNA, 18 bp, Artificial Sequence
  Target HLA Sequence complement
gaggatggagccgcgggc

SEQ ID NO: 12410 - DNA, 18 bp, Artificial Sequence
  Target HLA Sequence complement
aggatggagccgcgggcg

SEQ ID NO: 12411 - DNA, 18 bp, Artificial Sequence
  Target HLA Sequence complement
ggatggagccgcgggcgc

SEQ ID NO: 12412 - DNA, 18 bp, Artificial Sequence
  Target HLA Sequence complement
gatggagccgcgggcgcc

SEQ ID NO: 12413 - DNA, 18 bp, Artificial Sequence
  Target HLA Sequence complement
atggagccgcgggcgccg

SEQ ID NO: 12414 - DNA, 18 bp, Artificial Sequence
  Target HLA Sequence complement
tggagccgcgggcgccgt

SEQ ID NO: 12415 - DNA, 18 bp, Artificial Sequence
  Target HLA Sequence complement
ggagccgcgggcgccgtg

SEQ ID NO: 12416 - DNA, 18 bp, Artificial Sequence
  Target HLA Sequence complement
gagccgcgggcgccgtgg

SEQ ID NO: 12417 - DNA, 18 bp, Artificial Sequence
  Target HLA Sequence complement
agccgcgggcgccgtgga

SEQ ID NO: 12418 - DNA, 18 bp, Artificial Sequence
  Target HLA Sequence complement
gccgcgggcgccgtggat

SEQ ID NO: 12419 - DNA, 18 bp, Artificial Sequence
  Target HLA Sequence complement
ccgcgggcgccgtggata

SEQ ID NO: 12420 - DNA, 18 bp, Artificial Sequence
  Target HLA Sequence complement
cgcgggcgccgtggatag

SEQ ID NO: 12421 - DNA, 18 bp, Artificial Sequence
  Target HLA Sequence complement
gcgggcgccgtggataga

SEQ ID NO: 12422 - DNA, 18 bp, Artificial Sequence
  Target HLA Sequence complement
cgggcgccgtggatagag

SEQ ID NO: 12423 - DNA, 18 bp, Artificial Sequence
  Target HLA Sequence complement
gggcgccgtggatagagc

SEQ ID NO: 12424 - DNA, 18 bp, Artificial Sequence
  Target HLA Sequence complement
ggcgccgtggatagagca

SEQ ID NO: 12425 - DNA, 18 bp, Artificial Sequence
  Target HLA Sequence complement
gcgccgtggatagagcag

SEQ ID NO: 12426 - DNA, 18 bp, Artificial Sequence
  Target HLA Sequence complement
cgccgtggatagagcagg

SEQ ID NO: 12427 - DNA, 18 bp, Artificial Sequence
  Target HLA Sequence complement
gccgtggatagagcagga

SEQ ID NO: 12428 - DNA, 18 bp, Artificial Sequence
  Target HLA Sequence complement
ccgtggatagagcaggag

SEQ ID NO: 12429 - DNA, 18 bp, Artificial Sequence
  Target HLA Sequence complement
cgtggatagagcaggagg

SEQ ID NO: 12430 - DNA, 18 bp, Artificial Sequence
  Target HLA Sequence complement
gtggatagagcaggaggg

SEQ ID NO: 12431 - DNA, 18 bp, Artificial Sequence
  Target HLA Sequence complement
ggatagagcaggagggtc

SEQ ID NO: 12432 - DNA, 18 bp, Artificial Sequence
  Target HLA Sequence complement
gatagagcaggagggtcc

SEQ ID NO: 12433 - DNA, 18 bp, Artificial Sequence
  Target HLA Sequence complement
atagagcaggagggtccg

SEQ ID NO: 12434 - DNA, 18 bp, Artificial Sequence
  Target HLA Sequence complement
tagagcaggagggtccgg

SEQ ID NO: 12435 - DNA, 18 bp, Artificial Sequence
  Target HLA Sequence complement
agagcaggagggtccgga

SEQ ID NO: 12436 - DNA, 18 bp, Artificial Sequence
  Target HLA Sequence complement
gagcaggagggtccggag

SEQ ID NO: 12437 - DNA, 18 bp, Artificial Sequence
  Target HLA Sequence complement
agcaggagggtccggagt

SEQ ID NO: 12438 - DNA, 18 bp, Artificial Sequence
  Target HLA Sequence complement
gcaggagggtccggagta

SEQ ID NO: 12439 - DNA, 18 bp, Artificial Sequence
  Target HLA Sequence complement
caggagggtccggagtat

SEQ ID NO: 12440 - DNA, 18 bp, Artificial Sequence
  Target HLA Sequence complement
ggagggtccggagtattg

SEQ ID NO: 12441 - DNA, 18 bp, Artificial Sequence
  Target HLA Sequence complement
gagggtccggagtattgg

SEQ ID NO: 12442 - DNA, 18 bp, Artificial Sequence
  Target HLA Sequence complement
agggtccggagtattggg

SEQ ID NO: 12443 - DNA, 18 bp, Artificial Sequence
  Target HLA Sequence complement
gggtccggagtattggga

SEQ ID NO: 12444 - DNA, 18 bp, Artificial Sequence
  Target HLA Sequence complement
ggtccggagtattgggac

SEQ ID NO: 12445 - DNA, 18 bp, Artificial Sequence
  Target HLA Sequence complement
gtccggagtattgggacg

SEQ ID NO: 12446 - DNA, 18 bp, Artificial Sequence
  Target HLA Sequence complement
tccggagtattgggacgg

SEQ ID NO: 12447 - DNA, 18 bp, Artificial Sequence
  Target HLA Sequence complement
ccggagtattgggacggg

SEQ ID NO: 12448 - DNA, 18 bp, Artificial Sequence
  Target HLA Sequence complement
cggagtattgggacgggg

SEQ ID NO: 12449 - DNA, 18 bp, Artificial Sequence
  Target HLA Sequence complement
ggagtattgggacgggga

SEQ ID NO: 12450 - DNA, 18 bp, Artificial Sequence
  Target HLA Sequence complement
gagtattgggacggggag

SEQ ID NO: 12451 - DNA, 18 bp, Artificial Sequence
  Target HLA Sequence complement
gtattgggacggggagac

SEQ ID NO: 12452 - DNA, 18 bp, Artificial Sequence
  Target HLA Sequence complement
attgggacggggagacac

SEQ ID NO: 12453 - DNA, 18 bp, Artificial Sequence
  Target HLA Sequence complement
ttgggacggggagacacg

SEQ ID NO: 12454 - DNA, 18 bp, Artificial Sequence
  Target HLA Sequence complement
tgggacggggagacacgg

SEQ ID NO: 12455 - DNA, 18 bp, Artificial Sequence
  Target HLA Sequence complement
gggacggggagacacgga

SEQ ID NO: 12456 - DNA, 18 bp, Artificial Sequence
  Target HLA Sequence complement
ggacggggagacacggaa

SEQ ID NO: 12457 - DNA, 18 bp, Artificial Sequence
  Target HLA Sequence complement
gacggggagacacggaaa

SEQ ID NO: 12458 - DNA, 18 bp, Artificial Sequence
  Target HLA Sequence complement
acggggagacacggaaag

SEQ ID NO: 12459 - DNA, 18 bp, Artificial Sequence
  Target HLA Sequence complement
cggggagacacggaaagt

SEQ ID NO: 12460 - DNA, 18 bp, Artificial Sequence
  Target HLA Sequence complement
ggggagacacggaaagtg

SEQ ID NO: 12461 - DNA, 18 bp, Artificial Sequence
  Target HLA Sequence complement
cacggaaagtgaaggccc

SEQ ID NO: 12462 - DNA, 18 bp, Artificial Sequence
  Target HLA Sequence complement
cggaaagtgaaggcccac

SEQ ID NO: 12463 - DNA, 18 bp, Artificial Sequence
  Target HLA Sequence complement
gtgaaggcccactcacag

SEQ ID NO: 12464 - DNA, 18 bp, Artificial Sequence
  Target HLA Sequence complement
gaaggcccactcacagac

SEQ ID NO: 12465 - DNA, 18 bp, Artificial Sequence
  Target HLA Sequence complement
aggcccactcacagactc

SEQ ID NO: 12466 - DNA, 18 bp, Artificial Sequence
  Target HLA Sequence complement
ggcccactcacagactca

SEQ ID NO: 12467 - DNA, 18 bp, Artificial Sequence
  Target HLA Sequence complement
gcccactcacagactcac

SEQ ID NO: 12468 - DNA, 18 bp, Artificial Sequence
  Target HLA Sequence complement
cccactcacagactcacc

SEQ ID NO: 12469 - DNA, 18 bp, Artificial Sequence
  Target HLA Sequence complement
ccactcacagactcaccg

SEQ ID NO: 12470 - DNA, 18 bp, Artificial Sequence
  Target HLA Sequence complement
cacagactcaccgagtgg

SEQ ID NO: 12471 - DNA, 18 bp, Artificial Sequence
  Target HLA Sequence complement
cagactcaccgagtggac

SEQ ID NO: 12472 - DNA, 18 bp, Artificial Sequence
  Target HLA Sequence complement
agactcaccgagtggacc

SEQ ID NO: 12473 - DNA, 18 bp, Artificial Sequence
  Target HLA Sequence complement
gactcaccgagtggacct

SEQ ID NO: 12474 - DNA, 18 bp, Artificial Sequence
  Target HLA Sequence complement
actcaccgagtggacctg

SEQ ID NO: 12475 - DNA, 18 bp, Artificial Sequence
  Target HLA Sequence complement
ctcaccgagtggacctgg

SEQ ID NO: 12476 - DNA, 18 bp, Artificial Sequence
  Target HLA Sequence complement
tcaccgagtggacctggg

SEQ ID NO: 12477 - DNA, 18 bp, Artificial Sequence
  Target HLA Sequence complement
caccgagtggacctgggg

SEQ ID NO: 12478 - DNA, 18 bp, Artificial Sequence
  Target HLA Sequence complement
accgagtggacctgggga

SEQ ID NO: 12479 - DNA, 18 bp, Artificial Sequence
  Target HLA Sequence complement
ccgagtggacctggggac

SEQ ID NO: 12480 - DNA, 18 bp, Artificial Sequence
  Target HLA Sequence complement
cgagtggacctggggacc

SEQ ID NO: 12481 - DNA, 18 bp, Artificial Sequence
  Target HLA Sequence complement
gagtggacctggggaccc

SEQ ID NO: 12482 - DNA, 18 bp, Artificial Sequence
  Target HLA Sequence complement
agtggacctggggaccct

SEQ ID NO: 12483 - DNA, 18 bp, Artificial Sequence
  Target HLA Sequence complement
gtggacctggggaccctg

SEQ ID NO: 12484 - DNA, 18 bp, Artificial Sequence
  Target HLA Sequence complement
tggacctggggaccctgc

SEQ ID NO: 12485 - DNA, 18 bp, Artificial Sequence
  Target HLA Sequence complement
ggacctggggaccctgcg

SEQ ID NO: 12486 - DNA, 18 bp, Artificial Sequence
  Target HLA Sequence complement
gacctggggaccctgcgc

SEQ ID NO: 12487 - DNA, 18 bp, Artificial Sequence
  Target HLA Sequence complement
acctggggaccctgcgcg

SEQ ID NO: 12488 - DNA, 18 bp, Artificial Sequence
  Target HLA Sequence complement
cctggggaccctgcgcgg

SEQ ID NO: 12489 - DNA, 18 bp, Artificial Sequence
  Target HLA Sequence complement
ctggggaccctgcgcggc

SEQ ID NO: 12490 - DNA, 18 bp, Artificial Sequence
  Target HLA Sequence complement
tggggaccctgcgcggct

SEQ ID NO: 12491 - DNA, 18 bp, Artificial Sequence
  Target HLA Sequence complement
ggggaccctgcgcggcta

SEQ ID NO: 12492 - DNA, 18 bp, Artificial Sequence
  Target HLA Sequence complement
gggaccctgcgcggctac

SEQ ID NO: 12493 - DNA, 18 bp, Artificial Sequence
  Target HLA Sequence complement
ggaccctgcgcggctact

SEQ ID NO: 12494 - DNA, 18 bp, Artificial Sequence
  Target HLA Sequence complement
gaccctgcgcggctacta

SEQ ID NO: 12495 - DNA, 18 bp, Artificial Sequence
  Target HLA Sequence complement
accctgcgcggctactac

SEQ ID NO: 12496 - DNA, 18 bp, Artificial Sequence
  Target HLA Sequence complement
ccctgcgcggctactaca

SEQ ID NO: 12497 - DNA, 18 bp, Artificial Sequence
  Target HLA Sequence complement
cctgcgcggctactacaa

SEQ ID NO: 12498 - DNA, 18 bp, Artificial Sequence
  Target HLA Sequence complement
ctgcgcggctactacaac

SEQ ID NO: 12499 - DNA, 18 bp, Artificial Sequence
  Target HLA Sequence complement
tgcgcggctactacaacc

SEQ ID NO: 12500 - DNA, 18 bp, Artificial Sequence
  Target HLA Sequence complement
gcgcggctactacaacca

SEQ ID NO: 12501 - DNA, 18 bp, Artificial Sequence
  Target HLA Sequence complement
cgcggctactacaaccag

SEQ ID NO: 12502 - DNA, 18 bp, Artificial Sequence
  Target HLA Sequence complement
ctacaaccagagcgaggc

SEQ ID NO: 12503 - DNA, 18 bp, Artificial Sequence
  Target HLA Sequence complement
tacaaccagagcgaggcc

SEQ ID NO: 12504 - DNA, 18 bp, Artificial Sequence
  Target HLA Sequence complement
acaaccagagcgaggccg

SEQ ID NO: 12505 - DNA, 18 bp, Artificial Sequence
  Target HLA Sequence complement
caaccagagcgaggccgg

SEQ ID NO: 12506 - DNA, 18 bp, Artificial Sequence
  Target HLA Sequence complement
aaccagagcgaggccggt

SEQ ID NO: 12507 - DNA, 18 bp, Artificial Sequence
  Target HLA Sequence complement
accagagcgaggccggtt

SEQ ID NO: 12508 - DNA, 18 bp, Artificial Sequence
  Target HLA Sequence complement
ccagagcgaggccggttc

SEQ ID NO: 12509 - DNA, 18 bp, Artificial Sequence
  Target HLA Sequence complement
cagagcgaggccggttct

SEQ ID NO: 12510 - DNA, 18 bp, Artificial Sequence
  Target HLA Sequence complement
agagcgaggccggttctc

SEQ ID NO: 12511 - DNA, 18 bp, Artificial Sequence
  Target HLA Sequence complement
gagcgaggccggttctca

SEQ ID NO: 12512 - DNA, 18 bp, Artificial Sequence
  Target HLA Sequence complement
agcgaggccggttctcac

SEQ ID NO: 12513 - DNA, 18 bp, Artificial Sequence
  Target HLA Sequence complement
gcgaggccggttctcaca

SEQ ID NO: 12514 - DNA, 18 bp, Artificial Sequence
  Target HLA Sequence complement
cgaggccggttctcacac

SEQ ID NO: 12515 - DNA, 18 bp, Artificial Sequence
  Target HLA Sequence complement
gaggccggttctcacacc

SEQ ID NO: 12516 - DNA, 18 bp, Artificial Sequence
  Target HLA Sequence complement
aggccggttctcacaccg

SEQ ID NO: 12517 - DNA, 18 bp, Artificial Sequence
  Target HLA Sequence complement
ggccggttctcacaccgt

SEQ ID NO: 12518 - DNA, 18 bp, Artificial Sequence
  Target HLA Sequence complement
gccggttctcacaccgtc

SEQ ID NO: 12519 - DNA, 18 bp, Artificial Sequence
  Target HLA Sequence complement
ccggttctcacaccgtcc

SEQ ID NO: 12520 - DNA, 18 bp, Artificial Sequence
  Target HLA Sequence complement
cggttctcacaccgtcca

SEQ ID NO: 12521 - DNA, 18 bp, Artificial Sequence
  Target HLA Sequence complement
ggttctcacaccgtccag

SEQ ID NO: 12522 - DNA, 18 bp, Artificial Sequence
  Target HLA Sequence complement
tctcacaccgtccagagg

SEQ ID NO: 12523 - DNA, 18 bp, Artificial Sequence
  Target HLA Sequence complement
ctcacaccgtccagagga

SEQ ID NO: 12524 - DNA, 18 bp, Artificial Sequence
  Target HLA Sequence complement
cacaccgtccagaggatg

SEQ ID NO: 12525 - DNA, 18 bp, Artificial Sequence
  Target HLA Sequence complement
ggatgtatggctgcgacg

SEQ ID NO: 12526 - DNA, 18 bp, Artificial Sequence
  Target HLA Sequence complement
tgtatggctgcgacgtgg

SEQ ID NO: 12527 - DNA, 18 bp, Artificial Sequence
  Target HLA Sequence complement
gtatggctgcgacgtggg

SEQ ID NO: 12528 - DNA, 18 bp, Artificial Sequence
  Target HLA Sequence complement
tatggctgcgacgtgggg

SEQ ID NO: 12529 - DNA, 18 bp, Artificial Sequence
  Target HLA Sequence complement
atggctgcgacgtggggt

SEQ ID NO: 12530 - DNA, 18 bp, Artificial Sequence
  Target HLA Sequence complement
tggctgcgacgtggggtc

SEQ ID NO: 12531 - DNA, 18 bp, Artificial Sequence
  Target HLA Sequence complement
ggctgcgacgtggggtcg

SEQ ID NO: 12532 - DNA, 18 bp, Artificial Sequence
  Target HLA Sequence complement
gctgcgacgtggggtcgg

SEQ ID NO: 12533 - DNA, 18 bp, Artificial Sequence
  Target HLA Sequence complement
ctgcgacgtggggtcgga

SEQ ID NO: 12534 - DNA, 18 bp, Artificial Sequence
  Target HLA Sequence complement
tgcgacgtggggtcggac

SEQ ID NO: 12535 - DNA, 18 bp, Artificial Sequence
  Target HLA Sequence complement
gcgacgtggggtcggact

SEQ ID NO: 12536 - DNA, 18 bp, Artificial Sequence
  Target HLA Sequence complement
cgacgtggggtcggactg

SEQ ID NO: 12537 - DNA, 18 bp, Artificial Sequence
  Target HLA Sequence complement
gacgtggggtcggactgg

SEQ ID NO: 12538 - DNA, 18 bp, Artificial Sequence
  Target HLA Sequence complement
acgtggggtcggactggc

SEQ ID NO: 12539 - DNA, 18 bp, Artificial Sequence
  Target HLA Sequence complement
cgtggggtcggactggcg

SEQ ID NO: 12540 - DNA, 18 bp, Artificial Sequence
  Target HLA Sequence complement
gtggggtcggactggcgc

SEQ ID NO: 12541 - DNA, 18 bp, Artificial Sequence
  Target HLA Sequence complement
tggggtcggactggcgct

SEQ ID NO: 12542 - DNA, 18 bp, Artificial Sequence
  Target HLA Sequence complement
ggggtcggactggcgctt

SEQ ID NO: 12543 - DNA, 18 bp, Artificial Sequence
  Target HLA Sequence complement
gggtcggactggcgcttc

SEQ ID NO: 12544 - DNA, 18 bp, Artificial Sequence
  Target HLA Sequence complement
ggtcggactggcgcttcc

SEQ ID NO: 12545 - DNA, 18 bp, Artificial Sequence
  Target HLA Sequence complement
gtcggactggcgcttcct

SEQ ID NO: 12546 - DNA, 18 bp, Artificial Sequence
  Target HLA Sequence complement
tcggactggcgcttcctc

SEQ ID NO: 12547 - DNA, 18 bp, Artificial Sequence
  Target HLA Sequence complement
cggactggcgcttcctcc

SEQ ID NO: 12548 - DNA, 18 bp, Artificial Sequence
  Target HLA Sequence complement
ggactggcgcttcctccg

SEQ ID NO: 12549 - DNA, 18 bp, Artificial Sequence
  Target HLA Sequence complement
gactggcgcttcctccgc

SEQ ID NO: 12550 - DNA, 18 bp, Artificial Sequence
  Target HLA Sequence complement
actggcgcttcctccgcg

SEQ ID NO: 12551 - DNA, 18 bp, Artificial Sequence
  Target HLA Sequence complement
ctggcgcttcctccgcgg

SEQ ID NO: 12552 - DNA, 18 bp, Artificial Sequence
  Target HLA Sequence complement
tggcgcttcctccgcggg

SEQ ID NO: 12553 - DNA, 18 bp, Artificial Sequence
  Target HLA Sequence complement
ggcgcttcctccgcgggt

SEQ ID NO: 12554 - DNA, 18 bp, Artificial Sequence
  Target HLA Sequence complement
gcgcttcctccgcgggta

SEQ ID NO: 12555 - DNA, 18 bp, Artificial Sequence
  Target HLA Sequence complement
cgcttcctccgcgggtac

SEQ ID NO: 12556 - DNA, 18 bp, Artificial Sequence
  Target HLA Sequence complement
gcttcctccgcgggtacc

SEQ ID NO: 12557 - DNA, 18 bp, Artificial Sequence
  Target HLA Sequence complement
cttcctccgcgggtacca

SEQ ID NO: 12558 - DNA, 18 bp, Artificial Sequence
  Target HLA Sequence complement
ttcctccgcgggtaccac

SEQ ID NO: 12559 - DNA, 18 bp, Artificial Sequence
  Target HLA Sequence complement
tcctccgcgggtaccacc

SEQ ID NO: 12560 - DNA, 18 bp, Artificial Sequence
  Target HLA Sequence complement
cctccgcgggtaccacca

SEQ ID NO: 12561 - DNA, 18 bp, Artificial Sequence
  Target HLA Sequence complement
ctccgcgggtaccaccag

SEQ ID NO: 12562 - DNA, 18 bp, Artificial Sequence
  Target HLA Sequence complement
tccgcgggtaccaccagt

SEQ ID NO: 12563 - DNA, 18 bp, Artificial Sequence
  Target HLA Sequence complement
ccgcgggtaccaccagta

SEQ ID NO: 12564 - DNA, 18 bp, Artificial Sequence
  Target HLA Sequence complement
cgcgggtaccaccagtac

SEQ ID NO: 12565 - DNA, 18 bp, Artificial Sequence
  Target HLA Sequence complement
gcgggtaccaccagtacg

SEQ ID NO: 12566 - DNA, 18 bp, Artificial Sequence
  Target HLA Sequence complement
cgggtaccaccagtacgc

SEQ ID NO: 12567 - DNA, 18 bp, Artificial Sequence
  Target HLA Sequence complement
gggtaccaccagtacgcc

SEQ ID NO: 12568 - DNA, 18 bp, Artificial Sequence
  Target HLA Sequence complement
ggtaccaccagtacgcct

SEQ ID NO: 12569 - DNA, 18 bp, Artificial Sequence
  Target HLA Sequence complement
accaccagtacgcctacg

SEQ ID NO: 12570 - DNA, 18 bp, Artificial Sequence
  Target HLA Sequence complement
ccaccagtacgcctacga

SEQ ID NO: 12571 - DNA, 18 bp, Artificial Sequence
  Target HLA Sequence complement
caccagtacgcctacgac

SEQ ID NO: 12572 - DNA, 18 bp, Artificial Sequence
  Target HLA Sequence complement
accagtacgcctacgacg

SEQ ID NO: 12573 - DNA, 18 bp, Artificial Sequence
  Target HLA Sequence complement
ccagtacgcctacgacgg

SEQ ID NO: 12574 - DNA, 18 bp, Artificial Sequence
  Target HLA Sequence complement
cagtacgcctacgacggc

SEQ ID NO: 12575 - DNA, 18 bp, Artificial Sequence
  Target HLA Sequence complement
agtacgcctacgacggca

SEQ ID NO: 12576 - DNA, 18 bp, Artificial Sequence
  Target HLA Sequence complement
gtacgcctacgacggcaa

SEQ ID NO: 12577 - DNA, 18 bp, Artificial Sequence
  Target HLA Sequence complement
tacgcctacgacggcaag

SEQ ID NO: 12578 - DNA, 18 bp, Artificial Sequence
  Target HLA Sequence complement
acgcctacgacggcaagg

SEQ ID NO: 12579 - DNA, 18 bp, Artificial Sequence
  Target HLA Sequence complement
cgcctacgacggcaagga

SEQ ID NO: 12580 - DNA, 18 bp, Artificial Sequence
  Target HLA Sequence complement
gcctacgacggcaaggat

SEQ ID NO: 12581 - DNA, 18 bp, Artificial Sequence
  Target HLA Sequence complement
tcgccctgaaagaggacc

SEQ ID NO: 12582 - DNA, 18 bp, Artificial Sequence
  Target HLA Sequence complement
cgccctgaaagaggacct

SEQ ID NO: 12583 - DNA, 18 bp, Artificial Sequence
  Target HLA Sequence complement
gccctgaaagaggacctg

SEQ ID NO: 12584 - DNA, 18 bp, Artificial Sequence
  Target HLA Sequence complement
ccctgaaagaggacctgc

SEQ ID NO: 12585 - DNA, 18 bp, Artificial Sequence
  Target HLA Sequence complement
cctgaaagaggacctgcg

SEQ ID NO: 12586 - DNA, 18 bp, Artificial Sequence
  Target HLA Sequence complement
ctgaaagaggacctgcgc

SEQ ID NO: 12587 - DNA, 18 bp, Artificial Sequence
  Target HLA Sequence complement
gaaagaggacctgcgctc

SEQ ID NO: 12588 - DNA, 18 bp, Artificial Sequence
  Target HLA Sequence complement
agaggacctgcgctcttg

SEQ ID NO: 12589 - DNA, 18 bp, Artificial Sequence
  Target HLA Sequence complement
gaggacctgcgctcttgg

SEQ ID NO: 12590 - DNA, 18 bp, Artificial Sequence
  Target HLA Sequence complement
aggacctgcgctcttgga

SEQ ID NO: 12591 - DNA, 18 bp, Artificial Sequence
  Target HLA Sequence complement
ggacctgcgctcttggac

SEQ ID NO: 12592 - DNA, 18 bp, Artificial Sequence
  Target HLA Sequence complement
gacctgcgctcttggacc

SEQ ID NO: 12593 - DNA, 18 bp, Artificial Sequence
  Target HLA Sequence complement
acctgcgctcttggaccg

SEQ ID NO: 12594 - DNA, 18 bp, Artificial Sequence
  Target HLA Sequence complement
cctgcgctcttggaccgc

SEQ ID NO: 12595 - DNA, 18 bp, Artificial Sequence
  Target HLA Sequence complement
ctgcgctcttggaccgcg

SEQ ID NO: 12596 - DNA, 18 bp, Artificial Sequence
  Target HLA Sequence complement
tgcgctcttggaccgcgg

SEQ ID NO: 12597 - DNA, 18 bp, Artificial Sequence
  Target HLA Sequence complement
gcgctcttggaccgcggc

SEQ ID NO: 12598 - DNA, 18 bp, Artificial Sequence
  Target HLA Sequence complement
cgctcttggaccgcggcg

SEQ ID NO: 12599 - DNA, 18 bp, Artificial Sequence
  Target HLA Sequence complement
gctcttggaccgcggcgg

SEQ ID NO: 12600 - DNA, 18 bp, Artificial Sequence
  Target HLA Sequence complement
ctcttggaccgcggcgga

SEQ ID NO: 12601 - DNA, 18 bp, Artificial Sequence
  Target HLA Sequence complement
tcttggaccgcggcggac

SEQ ID NO: 12602 - DNA, 18 bp, Artificial Sequence
  Target HLA Sequence complement
cttggaccgcggcggaca

SEQ ID NO: 12603 - DNA, 18 bp, Artificial Sequence
  Target HLA Sequence complement
ttggaccgcggcggacat

SEQ ID NO: 12604 - DNA, 18 bp, Artificial Sequence
  Target HLA Sequence complement
tggaccgcggcggacatg

SEQ ID NO: 12605 - DNA, 18 bp, Artificial Sequence
  Target HLA Sequence complement
ggaccgcggcggacatgg

SEQ ID NO: 12606 - DNA, 18 bp, Artificial Sequence
  Target HLA Sequence complement
gaccgcggcggacatggc

SEQ ID NO: 12607 - DNA, 18 bp, Artificial Sequence
  Target HLA Sequence complement
accgcggcggacatggca

SEQ ID NO: 12608 - DNA, 18 bp, Artificial Sequence
  Target HLA Sequence complement
ccgcggcggacatggcag

SEQ ID NO: 12609 - DNA, 18 bp, Artificial Sequence
  Target HLA Sequence complement
cgcggcggacatggcagc

SEQ ID NO: 12610 - DNA, 18 bp, Artificial Sequence
  Target HLA Sequence complement
gcggcggacatggcagct

SEQ ID NO: 12611 - DNA, 18 bp, Artificial Sequence
  Target HLA Sequence complement
cggcggacatggcagctc

SEQ ID NO: 12612 - DNA, 18 bp, Artificial Sequence
  Target HLA Sequence complement
ggcggacatggcagctca

SEQ ID NO: 12613 - DNA, 18 bp, Artificial Sequence
  Target HLA Sequence complement
gcggacatggcagctcag

SEQ ID NO: 12614 - DNA, 18 bp, Artificial Sequence
  Target HLA Sequence complement
cggacatggcagctcaga

SEQ ID NO: 12615 - DNA, 18 bp, Artificial Sequence
  Target HLA Sequence complement
ggacatggcagctcagac

SEQ ID NO: 12616 - DNA, 18 bp, Artificial Sequence
  Target HLA Sequence complement
gacatggcagctcagacc

SEQ ID NO: 12617 - DNA, 18 bp, Artificial Sequence
  Target HLA Sequence complement
catggcagctcagaccac

SEQ ID NO: 12618 - DNA, 18 bp, Artificial Sequence
  Target HLA Sequence complement
atggcagctcagaccacc

SEQ ID NO: 12619 - DNA, 18 bp, Artificial Sequence
  Target HLA Sequence complement
tggcagctcagaccacca

SEQ ID NO: 12620 - DNA, 18 bp, Artificial Sequence
  Target HLA Sequence complement
ggcagctcagaccaccaa

SEQ ID NO: 12621 - DNA, 18 bp, Artificial Sequence
  Target HLA Sequence complement
gcagctcagaccaccaag

SEQ ID NO: 12622 - DNA, 18 bp, Artificial Sequence
  Target HLA Sequence complement
cagctcagaccaccaagc

SEQ ID NO: 12623 - DNA, 18 bp, Artificial Sequence
  Target HLA Sequence complement
gctcagaccaccaagcac

SEQ ID NO: 12624 - DNA, 18 bp, Artificial Sequence
  Target HLA Sequence complement
ccaccaagcacaagtggg

SEQ ID NO: 12625 - DNA, 18 bp, Artificial Sequence
  Target HLA Sequence complement
ccaagcacaagtgggagg

SEQ ID NO: 12626 - DNA, 18 bp, Artificial Sequence
  Target HLA Sequence complement
caagcacaagtgggaggc

SEQ ID NO: 12627 - DNA, 18 bp, Artificial Sequence
  Target HLA Sequence complement
aagcacaagtgggaggcg

SEQ ID NO: 12628 - DNA, 18 bp, Artificial Sequence
  Target HLA Sequence complement
agcacaagtgggaggcgg

SEQ ID NO: 12629 - DNA, 18 bp, Artificial Sequence
  Target HLA Sequence complement
gcacaagtgggaggcggc

SEQ ID NO: 12630 - DNA, 18 bp, Artificial Sequence
  Target HLA Sequence complement
cacaagtgggaggcggcc

SEQ ID NO: 12631 - DNA, 18 bp, Artificial Sequence
  Target HLA Sequence complement
acaagtgggaggcggccc

SEQ ID NO: 12632 - DNA, 18 bp, Artificial Sequence
  Target HLA Sequence complement
caagtgggaggcggccca

SEQ ID NO: 12633 - DNA, 18 bp, Artificial Sequence
  Target HLA Sequence complement
aagtgggaggcggcccat

SEQ ID NO: 12634 - DNA, 18 bp, Artificial Sequence
  Target HLA Sequence complement
agtgggaggcggcccatg

SEQ ID NO: 12635 - DNA, 18 bp, Artificial Sequence
  Target HLA Sequence complement
gtgggaggcggcccatgt

SEQ ID NO: 12636 - DNA, 18 bp, Artificial Sequence
  Target HLA Sequence complement
tgggaggcggcccatgtg

SEQ ID NO: 12637 - DNA, 18 bp, Artificial Sequence
  Target HLA Sequence complement
gggaggcggcccatgtgg

SEQ ID NO: 12638 - DNA, 18 bp, Artificial Sequence
  Target HLA Sequence complement
ggaggcggcccatgtggc

SEQ ID NO: 12639 - DNA, 18 bp, Artificial Sequence
  Target HLA Sequence complement
gaggcggcccatgtggcg

SEQ ID NO: 12640 - DNA, 18 bp, Artificial Sequence
  Target HLA Sequence complement
aggcggcccatgtggcgg

SEQ ID NO: 12641 - DNA, 18 bp, Artificial Sequence
  Target HLA Sequence complement
ggcggcccatgtggcgga

SEQ ID NO: 12642 - DNA, 18 bp, Artificial Sequence
  Target HLA Sequence complement
gcggcccatgtggcggag

SEQ ID NO: 12643 - DNA, 18 bp, Artificial Sequence
  Target HLA Sequence complement
cggcccatgtggcggagc

SEQ ID NO: 12644 - DNA, 18 bp, Artificial Sequence
  Target HLA Sequence complement
ggcccatgtggcggagca

SEQ ID NO: 12645 - DNA, 18 bp, Artificial Sequence
  Target HLA Sequence complement
gcccatgtggcggagcag

SEQ ID NO: 12646 - DNA, 18 bp, Artificial Sequence
  Target HLA Sequence complement
cccatgtggcggagcagt

SEQ ID NO: 12647 - DNA, 18 bp, Artificial Sequence
  Target HLA Sequence complement
ccatgtggcggagcagtt

SEQ ID NO: 12648 - DNA, 18 bp, Artificial Sequence
  Target HLA Sequence complement
catgtggcggagcagttg

SEQ ID NO: 12649 - DNA, 18 bp, Artificial Sequence
  Target HLA Sequence complement
tgtggcggagcagttgag

SEQ ID NO: 12650 - DNA, 18 bp, Artificial Sequence
  Target HLA Sequence complement
gtggcggagcagttgaga

SEQ ID NO: 12651 - DNA, 18 bp, Artificial Sequence
  Target HLA Sequence complement
tggcggagcagttgagag

SEQ ID NO: 12652 - DNA, 18 bp, Artificial Sequence
  Target HLA Sequence complement
ggcggagcagttgagagc

SEQ ID NO: 12653 - DNA, 18 bp, Artificial Sequence
  Target HLA Sequence complement
gcggagcagttgagagcc

SEQ ID NO: 12654 - DNA, 18 bp, Artificial Sequence
  Target HLA Sequence complement
cggagcagttgagagcct

SEQ ID NO: 12655 - DNA, 18 bp, Artificial Sequence
  Target HLA Sequence complement
tgagagcctacctggagg

SEQ ID NO: 12656 - DNA, 18 bp, Artificial Sequence
  Target HLA Sequence complement
gagagcctacctggaggg

SEQ ID NO: 12657 - DNA, 18 bp, Artificial Sequence
  Target HLA Sequence complement
agagcctacctggagggc

SEQ ID NO: 12658 - DNA, 18 bp, Artificial Sequence
  Target HLA Sequence complement
gagcctacctggagggca

SEQ ID NO: 12659 - DNA, 18 bp, Artificial Sequence
  Target HLA Sequence complement
agcctacctggagggcac

SEQ ID NO: 12660 - DNA, 18 bp, Artificial Sequence
  Target HLA Sequence complement
gcctacctggagggcacg

SEQ ID NO: 12661 - DNA, 18 bp, Artificial Sequence
  Target HLA Sequence complement
cctacctggagggcacgt

SEQ ID NO: 12662 - DNA, 18 bp, Artificial Sequence
  Target HLA Sequence complement
ctacctggagggcacgtg

SEQ ID NO: 12663 - DNA, 18 bp, Artificial Sequence
  Target HLA Sequence complement
tacctggagggcacgtgc

SEQ ID NO: 12664 - DNA, 18 bp, Artificial Sequence
  Target HLA Sequence complement
acctggagggcacgtgcg

SEQ ID NO: 12665 - DNA, 18 bp, Artificial Sequence
  Target HLA Sequence complement
cctggagggcacgtgcgt

SEQ ID NO: 12666 - DNA, 18 bp, Artificial Sequence
  Target HLA Sequence complement
ctggagggcacgtgcgtg

SEQ ID NO: 12667 - DNA, 18 bp, Artificial Sequence
  Target HLA Sequence complement
tggagggcacgtgcgtgg

SEQ ID NO: 12668 - DNA, 18 bp, Artificial Sequence
  Target HLA Sequence complement
ggagggcacgtgcgtgga

SEQ ID NO: 12669 - DNA, 18 bp, Artificial Sequence
  Target HLA Sequence complement
gagggcacgtgcgtggag

SEQ ID NO: 12670 - DNA, 18 bp, Artificial Sequence
  Target HLA Sequence complement
agggcacgtgcgtggagt

SEQ ID NO: 12671 - DNA, 18 bp, Artificial Sequence
  Target HLA Sequence complement
gggcacgtgcgtggagtg

SEQ ID NO: 12672 - DNA, 18 bp, Artificial Sequence
  Target HLA Sequence complement
ggcacgtgcgtggagtgg

SEQ ID NO: 12673 - DNA, 18 bp, Artificial Sequence
  Target HLA Sequence complement
gcacgtgcgtggagtggc

SEQ ID NO: 12674 - DNA, 18 bp, Artificial Sequence
  Target HLA Sequence complement
cacgtgcgtggagtggct

SEQ ID NO: 12675 - DNA, 18 bp, Artificial Sequence
  Target HLA Sequence complement
acgtgcgtggagtggctc

SEQ ID NO: 12676 - DNA, 18 bp, Artificial Sequence
  Target HLA Sequence complement
cgtgcgtggagtggctcc

SEQ ID NO: 12677 - DNA, 18 bp, Artificial Sequence
  Target HLA Sequence complement
gtgcgtggagtggctccg

SEQ ID NO: 12678 - DNA, 18 bp, Artificial Sequence
  Target HLA Sequence complement
tgcgtggagtggctccgc

SEQ ID NO: 12679 - DNA, 18 bp, Artificial Sequence
  Target HLA Sequence complement
gcgtggagtggctccgca

SEQ ID NO: 12680 - DNA, 18 bp, Artificial Sequence
  Target HLA Sequence complement
cgtggagtggctccgcag

SEQ ID NO: 12681 - DNA, 18 bp, Artificial Sequence
  Target HLA Sequence complement
gtggagtggctccgcaga

SEQ ID NO: 12682 - DNA, 18 bp, Artificial Sequence
  Target HLA Sequence complement
tggagtggctccgcagat

SEQ ID NO: 12683 - DNA, 18 bp, Artificial Sequence
  Target HLA Sequence complement
ggagtggctccgcagata

SEQ ID NO: 12684 - DNA, 18 bp, Artificial Sequence
  Target HLA Sequence complement
gagtggctccgcagatac

SEQ ID NO: 12685 - DNA, 18 bp, Artificial Sequence
  Target HLA Sequence complement
agtggctccgcagatacc

SEQ ID NO: 12686 - DNA, 18 bp, Artificial Sequence
  Target HLA Sequence complement
gtggctccgcagatacct

SEQ ID NO: 12687 - DNA, 18 bp, Artificial Sequence
  Target HLA Sequence complement
tggctccgcagatacctg

SEQ ID NO: 12688 - DNA, 18 bp, Artificial Sequence
  Target HLA Sequence complement
ggctccgcagatacctgg

SEQ ID NO: 12689 - DNA, 18 bp, Artificial Sequence
  Target HLA Sequence complement
gctccgcagatacctgga

SEQ ID NO: 12690 - DNA, 18 bp, Artificial Sequence
  Target HLA Sequence complement
ctccgcagatacctggag

SEQ ID NO: 12691 - DNA, 18 bp, Artificial Sequence
  Target HLA Sequence complement
acctggagaacgggaagg

SEQ ID NO: 12692 - DNA, 18 bp, Artificial Sequence
  Target HLA Sequence complement
cctggagaacgggaagga

SEQ ID NO: 12693 - DNA, 18 bp, Artificial Sequence
  Target HLA Sequence complement
ctggagaacgggaaggag

SEQ ID NO: 12694 - DNA, 18 bp, Artificial Sequence
  Target HLA Sequence complement
ggagaacgggaaggagac

SEQ ID NO: 12695 - DNA, 18 bp, Artificial Sequence
  Target HLA Sequence complement
gagaacgggaaggagacg

SEQ ID NO: 12696 - DNA, 18 bp, Artificial Sequence
  Target HLA Sequence complement
agaacgggaaggagacgc

SEQ ID NO: 12697 - DNA, 18 bp, Artificial Sequence
  Target HLA Sequence complement
gaacgggaaggagacgct

SEQ ID NO: 12698 - DNA, 18 bp, Artificial Sequence
  Target HLA Sequence complement
aacgggaaggagacgctg

SEQ ID NO: 12699 - DNA, 18 bp, Artificial Sequence
  Target HLA Sequence complement
acgggaaggagacgctgc

SEQ ID NO: 12700 - DNA, 18 bp, Artificial Sequence
  Target HLA Sequence complement
cgggaaggagacgctgca

SEQ ID NO: 12701 - DNA, 18 bp, Artificial Sequence
  Target HLA Sequence complement
gggaaggagacgctgcag

SEQ ID NO: 12702 - DNA, 18 bp, Artificial Sequence
  Target HLA Sequence complement
ggaaggagacgctgcagc

SEQ ID NO: 12703 - DNA, 18 bp, Artificial Sequence
  Target HLA Sequence complement
gaaggagacgctgcagcg

SEQ ID NO: 12704 - DNA, 18 bp, Artificial Sequence
  Target HLA Sequence complement
aaggagacgctgcagcgc

SEQ ID NO: 12705 - DNA, 18 bp, Artificial Sequence
  Target HLA Sequence complement
aggagacgctgcagcgca

SEQ ID NO: 12706 - DNA, 18 bp, Artificial Sequence
  Target HLA Sequence complement
ggagacgctgcagcgcac

SEQ ID NO: 12707 - DNA, 18 bp, Artificial Sequence
  Target HLA Sequence complement
gagacgctgcagcgcacg

SEQ ID NO: 12708 - DNA, 18 bp, Artificial Sequence
  Target HLA Sequence complement
agacgctgcagcgcacgg

SEQ ID NO: 12709 - DNA, 18 bp, Artificial Sequence
  Target HLA Sequence complement
gacgctgcagcgcacgga

SEQ ID NO: 12710 - DNA, 18 bp, Artificial Sequence
  Target HLA Sequence complement
acgctgcagcgcacggac

SEQ ID NO: 12711 - DNA, 18 bp, Artificial Sequence
  Target HLA Sequence complement
cgctgcagcgcacggacg

SEQ ID NO: 12712 - DNA, 18 bp, Artificial Sequence
  Target HLA Sequence complement
gctgcagcgcacggacgc

SEQ ID NO: 12713 - DNA, 18 bp, Artificial Sequence
  Target HLA Sequence complement
ctgcagcgcacggacgcc

SEQ ID NO: 12714 - DNA, 18 bp, Artificial Sequence
  Target HLA Sequence complement
tgcagcgcacggacgccc

SEQ ID NO: 12715 - DNA, 18 bp, Artificial Sequence
  Target HLA Sequence complement
gcagcgcacggacgcccc

SEQ ID NO: 12716 - DNA, 18 bp, Artificial Sequence
  Target HLA Sequence complement
cagcgcacggacgccccc

SEQ ID NO: 12717 - DNA, 18 bp, Artificial Sequence
  Target HLA Sequence complement
agcgcacggacgccccca

SEQ ID NO: 12718 - DNA, 18 bp, Artificial Sequence
  Target HLA Sequence complement
gcgcacggacgcccccaa

SEQ ID NO: 12719 - DNA, 18 bp, Artificial Sequence
  Target HLA Sequence complement
cgcacggacgcccccaaa

SEQ ID NO: 12720 - DNA, 18 bp, Artificial Sequence
  Target HLA Sequence complement
gcacggacgcccccaaaa

SEQ ID NO: 12721 - DNA, 18 bp, Artificial Sequence
  Target HLA Sequence complement
cacggacgcccccaaaac

SEQ ID NO: 12722 - DNA, 18 bp, Artificial Sequence
  Target HLA Sequence complement
acggacgcccccaaaacg

SEQ ID NO: 12723 - DNA, 18 bp, Artificial Sequence
  Target HLA Sequence complement
cggacgcccccaaaacgc

SEQ ID NO: 12724 - DNA, 18 bp, Artificial Sequence
  Target HLA Sequence complement
ggacgcccccaaaacgca

SEQ ID NO: 12725 - DNA, 18 bp, Artificial Sequence
  Target HLA Sequence complement
gacgcccccaaaacgcat

SEQ ID NO: 12726 - DNA, 18 bp, Artificial Sequence
  Target HLA Sequence complement
gactcaccacgctgtctc

SEQ ID NO: 12727 - DNA, 18 bp, Artificial Sequence
  Target HLA Sequence complement
ctcaccacgctgtctctg

SEQ ID NO: 12728 - DNA, 18 bp, Artificial Sequence
  Target HLA Sequence complement
caccacgctgtctctgac

SEQ ID NO: 12729 - DNA, 18 bp, Artificial Sequence
  Target HLA Sequence complement
accacgctgtctctgacc

SEQ ID NO: 12730 - DNA, 18 bp, Artificial Sequence
  Target HLA Sequence complement
ccacgctgtctctgacca

SEQ ID NO: 12731 - DNA, 18 bp, Artificial Sequence
  Target HLA Sequence complement
ctgaccatgaagccaccc

SEQ ID NO: 12732 - DNA, 18 bp, Artificial Sequence
  Target HLA Sequence complement
gaccatgaagccaccctg

SEQ ID NO: 12733 - DNA, 18 bp, Artificial Sequence
  Target HLA Sequence complement
ccatgaagccaccctgag

SEQ ID NO: 12734 - DNA, 18 bp, Artificial Sequence
  Target HLA Sequence complement
catgaagccaccctgagg

SEQ ID NO: 12735 - DNA, 18 bp, Artificial Sequence
  Target HLA Sequence complement
tgaagccaccctgaggtg

SEQ ID NO: 12736 - DNA, 18 bp, Artificial Sequence
  Target HLA Sequence complement
gaagccaccctgaggtgc

SEQ ID NO: 12737 - DNA, 18 bp, Artificial Sequence
  Target HLA Sequence complement
aagccaccctgaggtgct

SEQ ID NO: 12738 - DNA, 18 bp, Artificial Sequence
  Target HLA Sequence complement
agccaccctgaggtgctg

SEQ ID NO: 12739 - DNA, 18 bp, Artificial Sequence
  Target HLA Sequence complement
gccaccctgaggtgctgg

SEQ ID NO: 12740 - DNA, 18 bp, Artificial Sequence
  Target HLA Sequence complement
ccaccctgaggtgctggg

SEQ ID NO: 12741 - DNA, 18 bp, Artificial Sequence
  Target HLA Sequence complement
caccctgaggtgctgggc

SEQ ID NO: 12742 - DNA, 18 bp, Artificial Sequence
  Target HLA Sequence complement
accctgaggtgctgggcc

SEQ ID NO: 12743 - DNA, 18 bp, Artificial Sequence
  Target HLA Sequence complement
ccctgaggtgctgggccc

SEQ ID NO: 12744 - DNA, 18 bp, Artificial Sequence
  Target HLA Sequence complement
cctgaggtgctgggccct

SEQ ID NO: 12745 - DNA, 18 bp, Artificial Sequence
  Target HLA Sequence complement
ctgaggtgctgggccctg

SEQ ID NO: 12746 - DNA, 18 bp, Artificial Sequence
  Target HLA Sequence complement
tgaggtgctgggccctga

SEQ ID NO: 12747 - DNA, 18 bp, Artificial Sequence
  Target HLA Sequence complement
gaggtgctgggccctgag

SEQ ID NO: 12748 - DNA, 18 bp, Artificial Sequence
  Target HLA Sequence complement
aggtgctgggccctgagc

SEQ ID NO: 12749 - DNA, 18 bp, Artificial Sequence
  Target HLA Sequence complement
ggtgctgggccctgagct

SEQ ID NO: 12750 - DNA, 18 bp, Artificial Sequence
  Target HLA Sequence complement
gtgctgggccctgagctt

SEQ ID NO: 12751 - DNA, 18 bp, Artificial Sequence
  Target HLA Sequence complement
tgctgggccctgagcttc

SEQ ID NO: 12752 - DNA, 18 bp, Artificial Sequence
  Target HLA Sequence complement
gctgggccctgagcttct

SEQ ID NO: 12753 - DNA, 18 bp, Artificial Sequence
  Target HLA Sequence complement
ctgggccctgagcttcta

SEQ ID NO: 12754 - DNA, 18 bp, Artificial Sequence
  Target HLA Sequence complement
tgggccctgagcttctac

SEQ ID NO: 12755 - DNA, 18 bp, Artificial Sequence
  Target HLA Sequence complement
gggccctgagcttctacc

SEQ ID NO: 12756 - DNA, 18 bp, Artificial Sequence
  Target HLA Sequence complement
ggccctgagcttctaccc

SEQ ID NO: 12757 - DNA, 18 bp, Artificial Sequence
  Target HLA Sequence complement
gccctgagcttctaccct

SEQ ID NO: 12758 - DNA, 18 bp, Artificial Sequence
  Target HLA Sequence complement
ccctgagcttctaccctg

SEQ ID NO: 12759 - DNA, 18 bp, Artificial Sequence
  Target HLA Sequence complement
cctgagcttctaccctgc

SEQ ID NO: 12760 - DNA, 18 bp, Artificial Sequence
  Target HLA Sequence complement
ctgagcttctaccctgcg

SEQ ID NO: 12761 - DNA, 18 bp, Artificial Sequence
  Target HLA Sequence complement
tgagcttctaccctgcgg

SEQ ID NO: 12762 - DNA, 18 bp, Artificial Sequence
  Target HLA Sequence complement
gagcttctaccctgcgga

SEQ ID NO: 12763 - DNA, 18 bp, Artificial Sequence
  Target HLA Sequence complement
agcttctaccctgcggag

SEQ ID NO: 12764 - DNA, 18 bp, Artificial Sequence
  Target HLA Sequence complement
gcttctaccctgcggaga

SEQ ID NO: 12765 - DNA, 18 bp, Artificial Sequence
  Target HLA Sequence complement
ctaccctgcggagatcac

SEQ ID NO: 12766 - DNA, 18 bp, Artificial Sequence
  Target HLA Sequence complement
accctgcggagatcacac

SEQ ID NO: 12767 - DNA, 18 bp, Artificial Sequence
  Target HLA Sequence complement
ccctgcggagatcacact

SEQ ID NO: 12768 - DNA, 18 bp, Artificial Sequence
  Target HLA Sequence complement
cctgcggagatcacactg

SEQ ID NO: 12769 - DNA, 18 bp, Artificial Sequence
  Target HLA Sequence complement
gcggagatcacactgacc

SEQ ID NO: 12770 - DNA, 18 bp, Artificial Sequence
  Target HLA Sequence complement
tcacactgacctggcagc

SEQ ID NO: 12771 - DNA, 18 bp, Artificial Sequence
  Target HLA Sequence complement
cacactgacctggcagcg

SEQ ID NO: 12772 - DNA, 18 bp, Artificial Sequence
  Target HLA Sequence complement
acactgacctggcagcgg

SEQ ID NO: 12773 - DNA, 18 bp, Artificial Sequence
  Target HLA Sequence complement
cactgacctggcagcggg

SEQ ID NO: 12774 - DNA, 18 bp, Artificial Sequence
  Target HLA Sequence complement
actgacctggcagcggga

SEQ ID NO: 12775 - DNA, 18 bp, Artificial Sequence
  Target HLA Sequence complement
ctgacctggcagcgggat

SEQ ID NO: 12776 - DNA, 18 bp, Artificial Sequence
  Target HLA Sequence complement
tgacctggcagcgggatg

SEQ ID NO: 12777 - DNA, 18 bp, Artificial Sequence
  Target HLA Sequence complement
gacctggcagcgggatgg

SEQ ID NO: 12778 - DNA, 18 bp, Artificial Sequence
  Target HLA Sequence complement
acctggcagcgggatggg

SEQ ID NO: 12779 - DNA, 18 bp, Artificial Sequence
  Target HLA Sequence complement
cctggcagcgggatgggg

SEQ ID NO: 12780 - DNA, 18 bp, Artificial Sequence
  Target HLA Sequence complement
ctggcagcgggatgggga

SEQ ID NO: 12781 - DNA, 18 bp, Artificial Sequence
  Target HLA Sequence complement
tggcagcgggatggggag

SEQ ID NO: 12782 - DNA, 18 bp, Artificial Sequence
  Target HLA Sequence complement
ggcagcgggatggggagg

SEQ ID NO: 12783 - DNA, 18 bp, Artificial Sequence
  Target HLA Sequence complement
gcagcgggatggggagga

SEQ ID NO: 12784 - DNA, 18 bp, Artificial Sequence
  Target HLA Sequence complement
cagcgggatggggaggac

SEQ ID NO: 12785 - DNA, 18 bp, Artificial Sequence
  Target HLA Sequence complement
agcgggatggggaggacc

SEQ ID NO: 12786 - DNA, 18 bp, Artificial Sequence
  Target HLA Sequence complement
gcgggatggggaggacca

SEQ ID NO: 12787 - DNA, 18 bp, Artificial Sequence
  Target HLA Sequence complement
cgggatggggaggaccag

SEQ ID NO: 12788 - DNA, 18 bp, Artificial Sequence
  Target HLA Sequence complement
gggatggggaggaccaga

SEQ ID NO: 12789 - DNA, 18 bp, Artificial Sequence
  Target HLA Sequence complement
ggatggggaggaccagac

SEQ ID NO: 12790 - DNA, 18 bp, Artificial Sequence
  Target HLA Sequence complement
gatggggaggaccagacc

SEQ ID NO: 12791 - DNA, 18 bp, Artificial Sequence
  Target HLA Sequence complement
atggggaggaccagaccc

SEQ ID NO: 12792 - DNA, 18 bp, Artificial Sequence
  Target HLA Sequence complement
tggggaggaccagaccca

SEQ ID NO: 12793 - DNA, 18 bp, Artificial Sequence
  Target HLA Sequence complement
ggggaggaccagacccag

SEQ ID NO: 12794 - DNA, 18 bp, Artificial Sequence
  Target HLA Sequence complement
gggaggaccagacccagg

SEQ ID NO: 12795 - DNA, 18 bp, Artificial Sequence
  Target HLA Sequence complement
ggaggaccagacccagga

SEQ ID NO: 12796 - DNA, 18 bp, Artificial Sequence
  Target HLA Sequence complement
gaggaccagacccaggac

SEQ ID NO: 12797 - DNA, 18 bp, Artificial Sequence
  Target HLA Sequence complement
aggaccagacccaggaca

SEQ ID NO: 12798 - DNA, 18 bp, Artificial Sequence
  Target HLA Sequence complement
ggaccagacccaggacac

SEQ ID NO: 12799 - DNA, 18 bp, Artificial Sequence
  Target HLA Sequence complement
gaccagacccaggacacg

SEQ ID NO: 12800 - DNA, 18 bp, Artificial Sequence
  Target HLA Sequence complement
accagacccaggacacgg

SEQ ID NO: 12801 - DNA, 18 bp, Artificial Sequence
  Target HLA Sequence complement
ccagacccaggacacgga

SEQ ID NO: 12802 - DNA, 18 bp, Artificial Sequence
  Target HLA Sequence complement
cagacccaggacacggag

SEQ ID NO: 12803 - DNA, 18 bp, Artificial Sequence
  Target HLA Sequence complement
agacccaggacacggagc

SEQ ID NO: 12804 - DNA, 18 bp, Artificial Sequence
  Target HLA Sequence complement
gacccaggacacggagct

SEQ ID NO: 12805 - DNA, 18 bp, Artificial Sequence
  Target HLA Sequence complement
acccaggacacggagctc

SEQ ID NO: 12806 - DNA, 18 bp, Artificial Sequence
  Target HLA Sequence complement
cccaggacacggagctcg

SEQ ID NO: 12807 - DNA, 18 bp, Artificial Sequence
  Target HLA Sequence complement
ccaggacacggagctcgt

SEQ ID NO: 12808 - DNA, 18 bp, Artificial Sequence
  Target HLA Sequence complement
caggacacggagctcgtg

SEQ ID NO: 12809 - DNA, 18 bp, Artificial Sequence
  Target HLA Sequence complement
aggacacggagctcgtgg

SEQ ID NO: 12810 - DNA, 18 bp, Artificial Sequence
  Target HLA Sequence complement
ggacacggagctcgtgga

SEQ ID NO: 12811 - DNA, 18 bp, Artificial Sequence
  Target HLA Sequence complement
gacacggagctcgtggag

SEQ ID NO: 12812 - DNA, 18 bp, Artificial Sequence
  Target HLA Sequence complement
acacggagctcgtggaga

SEQ ID NO: 12813 - DNA, 18 bp, Artificial Sequence
  Target HLA Sequence complement
cacggagctcgtggagac

SEQ ID NO: 12814 - DNA, 18 bp, Artificial Sequence
  Target HLA Sequence complement
acggagctcgtggagacc

SEQ ID NO: 12815 - DNA, 18 bp, Artificial Sequence
  Target HLA Sequence complement
cggagctcgtggagacca

SEQ ID NO: 12816 - DNA, 18 bp, Artificial Sequence
  Target HLA Sequence complement
ggagctcgtggagaccag

SEQ ID NO: 12817 - DNA, 18 bp, Artificial Sequence
  Target HLA Sequence complement
gagctcgtggagaccagg

SEQ ID NO: 12818 - DNA, 18 bp, Artificial Sequence
  Target HLA Sequence complement
agctcgtggagaccaggc

SEQ ID NO: 12819 - DNA, 18 bp, Artificial Sequence
  Target HLA Sequence complement
gctcgtggagaccaggcc

SEQ ID NO: 12820 - DNA, 18 bp, Artificial Sequence
  Target HLA Sequence complement
ctcgtggagaccaggcct

SEQ ID NO: 12821 - DNA, 18 bp, Artificial Sequence
  Target HLA Sequence complement
tcgtggagaccaggcctg

SEQ ID NO: 12822 - DNA, 18 bp, Artificial Sequence
  Target HLA Sequence complement
cgtggagaccaggcctgc

SEQ ID NO: 12823 - DNA, 18 bp, Artificial Sequence
  Target HLA Sequence complement
gtggagaccaggcctgca

SEQ ID NO: 12824 - DNA, 18 bp, Artificial Sequence
  Target HLA Sequence complement
tggagaccaggcctgcag

SEQ ID NO: 12825 - DNA, 18 bp, Artificial Sequence
  Target HLA Sequence complement
ggagaccaggcctgcagg

SEQ ID NO: 12826 - DNA, 18 bp, Artificial Sequence
  Target HLA Sequence complement
gagaccaggcctgcaggg

SEQ ID NO: 12827 - DNA, 18 bp, Artificial Sequence
  Target HLA Sequence complement
agaccaggcctgcagggg

SEQ ID NO: 12828 - DNA, 18 bp, Artificial Sequence
  Target HLA Sequence complement
gaccaggcctgcagggga

SEQ ID NO: 12829 - DNA, 18 bp, Artificial Sequence
  Target HLA Sequence complement
accaggcctgcaggggat

SEQ ID NO: 12830 - DNA, 18 bp, Artificial Sequence
  Target HLA Sequence complement
ccaggcctgcaggggatg

SEQ ID NO: 12831 - DNA, 18 bp, Artificial Sequence
  Target HLA Sequence complement
caggcctgcaggggatgg

SEQ ID NO: 12832 - DNA, 18 bp, Artificial Sequence
  Target HLA Sequence complement
aggcctgcaggggatgga

SEQ ID NO: 12833 - DNA, 18 bp, Artificial Sequence
  Target HLA Sequence complement
ggcctgcaggggatggaa

SEQ ID NO: 12834 - DNA, 18 bp, Artificial Sequence
  Target HLA Sequence complement
gcctgcaggggatggaac

SEQ ID NO: 12835 - DNA, 18 bp, Artificial Sequence
  Target HLA Sequence complement
cctgcaggggatggaacc

SEQ ID NO: 12836 - DNA, 18 bp, Artificial Sequence
  Target HLA Sequence complement
ctgcaggggatggaacct

SEQ ID NO: 12837 - DNA, 18 bp, Artificial Sequence
  Target HLA Sequence complement
gcaggggatggaaccttc

SEQ ID NO: 12838 - DNA, 18 bp, Artificial Sequence
  Target HLA Sequence complement
caggggatggaaccttcc

SEQ ID NO: 12839 - DNA, 18 bp, Artificial Sequence
  Target HLA Sequence complement
ggggatggaaccttccag

SEQ ID NO: 12840 - DNA, 18 bp, Artificial Sequence
  Target HLA Sequence complement
accttccagaagtgggcg

SEQ ID NO: 12841 - DNA, 18 bp, Artificial Sequence
  Target HLA Sequence complement
ccttccagaagtgggcgg

SEQ ID NO: 12842 - DNA, 18 bp, Artificial Sequence
  Target HLA Sequence complement
cttccagaagtgggcggc

SEQ ID NO: 12843 - DNA, 18 bp, Artificial Sequence
  Target HLA Sequence complement
ttccagaagtgggcggct

SEQ ID NO: 12844 - DNA, 18 bp, Artificial Sequence
  Target HLA Sequence complement
tccagaagtgggcggctg

SEQ ID NO: 12845 - DNA, 18 bp, Artificial Sequence
  Target HLA Sequence complement
ccagaagtgggcggctgt

SEQ ID NO: 12846 - DNA, 18 bp, Artificial Sequence
  Target HLA Sequence complement
cagaagtgggcggctgtg

SEQ ID NO: 12847 - DNA, 18 bp, Artificial Sequence
  Target HLA Sequence complement
agaagtgggcggctgtgg

SEQ ID NO: 12848 - DNA, 18 bp, Artificial Sequence
  Target HLA Sequence complement
gaagtgggcggctgtggt

SEQ ID NO: 12849 - DNA, 18 bp, Artificial Sequence
  Target HLA Sequence complement
aagtgggcggctgtggtg

SEQ ID NO: 12850 - DNA, 18 bp, Artificial Sequence
  Target HLA Sequence complement
agtgggcggctgtggtgg

SEQ ID NO: 12851 - DNA, 18 bp, Artificial Sequence
  Target HLA Sequence complement
gtgggcggctgtggtggt

SEQ ID NO: 12852 - DNA, 18 bp, Artificial Sequence
  Target HLA Sequence complement
tgggcggctgtggtggtg

SEQ ID NO: 12853 - DNA, 18 bp, Artificial Sequence
  Target HLA Sequence complement
gggcggctgtggtggtgc

SEQ ID NO: 12854 - DNA, 18 bp, Artificial Sequence
  Target HLA Sequence complement
ggcggctgtggtggtgcc

SEQ ID NO: 12855 - DNA, 18 bp, Artificial Sequence
  Target HLA Sequence complement
gcggctgtggtggtgcct

SEQ ID NO: 12856 - DNA, 18 bp, Artificial Sequence
  Target HLA Sequence complement
cggctgtggtggtgcctt

SEQ ID NO: 12857 - DNA, 18 bp, Artificial Sequence
  Target HLA Sequence complement
ggctgtggtggtgccttc

SEQ ID NO: 12858 - DNA, 18 bp, Artificial Sequence
  Target HLA Sequence complement
gctgtggtggtgccttct

SEQ ID NO: 12859 - DNA, 18 bp, Artificial Sequence
  Target HLA Sequence complement
ctgtggtggtgccttctg

SEQ ID NO: 12860 - DNA, 18 bp, Artificial Sequence
  Target HLA Sequence complement
tgtggtggtgccttctgg

SEQ ID NO: 12861 - DNA, 18 bp, Artificial Sequence
  Target HLA Sequence complement
gtggtggtgccttctgga

SEQ ID NO: 12862 - DNA, 18 bp, Artificial Sequence
  Target HLA Sequence complement
tggtggtgccttctggac

SEQ ID NO: 12863 - DNA, 18 bp, Artificial Sequence
  Target HLA Sequence complement
ggtggtgccttctggaca

SEQ ID NO: 12864 - DNA, 18 bp, Artificial Sequence
  Target HLA Sequence complement
gtggtgccttctggacag

SEQ ID NO: 12865 - DNA, 18 bp, Artificial Sequence
  Target HLA Sequence complement
tggtgccttctggacagg

SEQ ID NO: 12866 - DNA, 18 bp, Artificial Sequence
  Target HLA Sequence complement
ggtgccttctggacagga

SEQ ID NO: 12867 - DNA, 18 bp, Artificial Sequence
  Target HLA Sequence complement
gtgccttctggacaggag

SEQ ID NO: 12868 - DNA, 18 bp, Artificial Sequence
  Target HLA Sequence complement
tgccttctggacaggagc

SEQ ID NO: 12869 - DNA, 18 bp, Artificial Sequence
  Target HLA Sequence complement
gccttctggacaggagca

SEQ ID NO: 12870 - DNA, 18 bp, Artificial Sequence
  Target HLA Sequence complement
ccttctggacaggagcag

SEQ ID NO: 12871 - DNA, 18 bp, Artificial Sequence
  Target HLA Sequence complement
acacctgccatgtgcagc

SEQ ID NO: 12872 - DNA, 18 bp, Artificial Sequence
  Target HLA Sequence complement
cacctgccatgtgcagca

SEQ ID NO: 12873 - DNA, 18 bp, Artificial Sequence
  Target HLA Sequence complement
cctgccatgtgcagcatg

SEQ ID NO: 12874 - DNA, 18 bp, Artificial Sequence
  Target HLA Sequence complement
gccatgtgcagcatgagg

SEQ ID NO: 12875 - DNA, 18 bp, Artificial Sequence
  Target HLA Sequence complement
ccatgtgcagcatgaggg

SEQ ID NO: 12876 - DNA, 18 bp, Artificial Sequence
  Target HLA Sequence complement
gcagcatgagggtttgcc

SEQ ID NO: 12877 - DNA, 18 bp, Artificial Sequence
  Target HLA Sequence complement
cagcatgagggtttgccc

SEQ ID NO: 12878 - DNA, 18 bp, Artificial Sequence
  Target HLA Sequence complement
tgagggtttgcccaagcc

SEQ ID NO: 12879 - DNA, 18 bp, Artificial Sequence
  Target HLA Sequence complement
gagggtttgcccaagccc

SEQ ID NO: 12880 - DNA, 18 bp, Artificial Sequence
  Target HLA Sequence complement
agggtttgcccaagcccc

SEQ ID NO: 12881 - DNA, 18 bp, Artificial Sequence
  Target HLA Sequence complement
gggtttgcccaagcccct

SEQ ID NO: 12882 - DNA, 18 bp, Artificial Sequence
  Target HLA Sequence complement
ggtttgcccaagcccctc

SEQ ID NO: 12883 - DNA, 18 bp, Artificial Sequence
  Target HLA Sequence complement
gtttgcccaagcccctca

SEQ ID NO: 12884 - DNA, 18 bp, Artificial Sequence
  Target HLA Sequence complement
tttgcccaagcccctcac

SEQ ID NO: 12885 - DNA, 18 bp, Artificial Sequence
  Target HLA Sequence complement
ttgcccaagcccctcacc

SEQ ID NO: 12886 - DNA, 18 bp, Artificial Sequence
  Target HLA Sequence complement
tgcccaagcccctcaccc

SEQ ID NO: 12887 - DNA, 18 bp, Artificial Sequence
  Target HLA Sequence complement
gcccaagcccctcaccct

SEQ ID NO: 12888 - DNA, 18 bp, Artificial Sequence
  Target HLA Sequence complement
cccaagcccctcaccctg

SEQ ID NO: 12889 - DNA, 18 bp, Artificial Sequence
  Target HLA Sequence complement
ccaagcccctcaccctga

SEQ ID NO: 12890 - DNA, 18 bp, Artificial Sequence
  Target HLA Sequence complement
caagcccctcaccctgag

SEQ ID NO: 12891 - DNA, 18 bp, Artificial Sequence
  Target HLA Sequence complement
aagcccctcaccctgaga

SEQ ID NO: 12892 - DNA, 18 bp, Artificial Sequence
  Target HLA Sequence complement
agcccctcaccctgagat

SEQ ID NO: 12893 - DNA, 18 bp, Artificial Sequence
  Target HLA Sequence complement
gcccctcaccctgagatg

SEQ ID NO: 12894 - DNA, 18 bp, Artificial Sequence
  Target HLA Sequence complement
cccctcaccctgagatgg

SEQ ID NO: 12895 - DNA, 18 bp, Artificial Sequence
  Target HLA Sequence complement
ccctcaccctgagatggg

SEQ ID NO: 12896 - DNA, 18 bp, Artificial Sequence
  Target HLA Sequence complement
cctcaccctgagatggga

SEQ ID NO: 12897 - DNA, 18 bp, Artificial Sequence
  Target HLA Sequence complement
ctcaccctgagatgggag

SEQ ID NO: 12898 - DNA, 18 bp, Artificial Sequence
  Target HLA Sequence complement
tcaccctgagatgggagc

SEQ ID NO: 12899 - DNA, 18 bp, Artificial Sequence
  Target HLA Sequence complement
caccctgagatgggagcc

SEQ ID NO: 12900 - DNA, 18 bp, Artificial Sequence
  Target HLA Sequence complement
accctgagatgggagccg

SEQ ID NO: 12901 - DNA, 18 bp, Artificial Sequence
  Target HLA Sequence complement
ccctgagatgggagccgt

SEQ ID NO: 12902 - DNA, 18 bp, Artificial Sequence
  Target HLA Sequence complement
cctgagatgggagccgtc

SEQ ID NO: 12903 - DNA, 18 bp, Artificial Sequence
  Target HLA Sequence complement
ctgagatgggagccgtct

SEQ ID NO: 12904 - DNA, 18 bp, Artificial Sequence
  Target HLA Sequence complement
gagatgggagccgtcttc

SEQ ID NO: 12905 - DNA, 18 bp, Artificial Sequence
  Target HLA Sequence complement
agatgggagccgtcttcc

SEQ ID NO: 12906 - DNA, 18 bp, Artificial Sequence
  Target HLA Sequence complement
gatgggagccgtcttccc

SEQ ID NO: 12907 - DNA, 18 bp, Artificial Sequence
  Target HLA Sequence complement
atgggagccgtcttccca

SEQ ID NO: 12908 - DNA, 18 bp, Artificial Sequence
  Target HLA Sequence complement
tgggagccgtcttcccag

SEQ ID NO: 12909 - DNA, 18 bp, Artificial Sequence
  Target HLA Sequence complement
gggagccgtcttcccagc

SEQ ID NO: 12910 - DNA, 18 bp, Artificial Sequence
  Target HLA Sequence complement
ggagccgtcttcccagcc

SEQ ID NO: 12911 - DNA, 18 bp, Artificial Sequence
  Target HLA Sequence complement
gagccgtcttcccagccc

SEQ ID NO: 12912 - DNA, 18 bp, Artificial Sequence
  Target HLA Sequence complement
agccgtcttcccagccca

SEQ ID NO: 12913 - DNA, 18 bp, Artificial Sequence
  Target HLA Sequence complement
gccgtcttcccagcccac

SEQ ID NO: 12914 - DNA, 18 bp, Artificial Sequence
  Target HLA Sequence complement
ccgtcttcccagcccacc

SEQ ID NO: 12915 - DNA, 18 bp, Artificial Sequence
  Target HLA Sequence complement
cgtcttcccagcccacca

SEQ ID NO: 12916 - DNA, 18 bp, Artificial Sequence
  Target HLA Sequence complement
gtcttcccagcccaccat

SEQ ID NO: 12917 - DNA, 18 bp, Artificial Sequence
  Target HLA Sequence complement
tcttcccagcccaccatc

SEQ ID NO: 12918 - DNA, 18 bp, Artificial Sequence
  Target HLA Sequence complement
cttcccagcccaccatcc

SEQ ID NO: 12919 - DNA, 18 bp, Artificial Sequence
  Target HLA Sequence complement
ttcccagcccaccatccc

SEQ ID NO: 12920 - DNA, 18 bp, Artificial Sequence
  Target HLA Sequence complement
tcccagcccaccatcccc

SEQ ID NO: 12921 - DNA, 18 bp, Artificial Sequence
  Target HLA Sequence complement
cccagcccaccatcccca

SEQ ID NO: 12922 - DNA, 18 bp, Artificial Sequence
  Target HLA Sequence complement
ccagcccaccatccccat

SEQ ID NO: 12923 - DNA, 18 bp, Artificial Sequence
  Target HLA Sequence complement
cagcccaccatccccatc

SEQ ID NO: 12924 - DNA, 18 bp, Artificial Sequence
  Target HLA Sequence complement
agcccaccatccccatcg

SEQ ID NO: 12925 - DNA, 18 bp, Artificial Sequence
  Target HLA Sequence complement
gcccaccatccccatcgt

SEQ ID NO: 12926 - DNA, 18 bp, Artificial Sequence
  Target HLA Sequence complement
cccaccatccccatcgtg

SEQ ID NO: 12927 - DNA, 18 bp, Artificial Sequence
  Target HLA Sequence complement
ccaccatccccatcgtgg

SEQ ID NO: 12928 - DNA, 18 bp, Artificial Sequence
  Target HLA Sequence complement
caccatccccatcgtggg

SEQ ID NO: 12929 - DNA, 18 bp, Artificial Sequence
  Target HLA Sequence complement
accatccccatcgtgggc

SEQ ID NO: 12930 - DNA, 18 bp, Artificial Sequence
  Target HLA Sequence complement
ccatccccatcgtgggca

SEQ ID NO: 12931 - DNA, 18 bp, Artificial Sequence
  Target HLA Sequence complement
catccccatcgtgggcat

SEQ ID NO: 12932 - DNA, 18 bp, Artificial Sequence
  Target HLA Sequence complement
atccccatcgtgggcatc

SEQ ID NO: 12933 - DNA, 18 bp, Artificial Sequence
  Target HLA Sequence complement
tccccatcgtgggcatca

SEQ ID NO: 12934 - DNA, 18 bp, Artificial Sequence
  Target HLA Sequence complement
ccccatcgtgggcatcat

SEQ ID NO: 12935 - DNA, 18 bp, Artificial Sequence
  Target HLA Sequence complement
cgtgggcatcattgctgg

SEQ ID NO: 12936 - DNA, 18 bp, Artificial Sequence
  Target HLA Sequence complement
gtgggcatcattgctggc

SEQ ID NO: 12937 - DNA, 18 bp, Artificial Sequence
  Target HLA Sequence complement
tgggcatcattgctggcc

SEQ ID NO: 12938 - DNA, 18 bp, Artificial Sequence
  Target HLA Sequence complement
gggcatcattgctggcct

SEQ ID NO: 12939 - DNA, 18 bp, Artificial Sequence
  Target HLA Sequence complement
ggcatcattgctggcctg

SEQ ID NO: 12940 - DNA, 18 bp, Artificial Sequence
  Target HLA Sequence complement
gcatcattgctggcctgg

SEQ ID NO: 12941 - DNA, 18 bp, Artificial Sequence
  Target HLA Sequence complement
tcactggagctgtggtcg

SEQ ID NO: 12942 - DNA, 18 bp, Artificial Sequence
  Target HLA Sequence complement
cactggagctgtggtcgc

SEQ ID NO: 12943 - DNA, 18 bp, Artificial Sequence
  Target HLA Sequence complement
actggagctgtggtcgct

SEQ ID NO: 12944 - DNA, 18 bp, Artificial Sequence
  Target HLA Sequence complement
ctggagctgtggtcgctg

SEQ ID NO: 12945 - DNA, 18 bp, Artificial Sequence
  Target HLA Sequence complement
tggagctgtggtcgctgc

SEQ ID NO: 12946 - DNA, 18 bp, Artificial Sequence
  Target HLA Sequence complement
ggagctgtggtcgctgct

SEQ ID NO: 12947 - DNA, 18 bp, Artificial Sequence
  Target HLA Sequence complement
gagctgtggtcgctgctg

SEQ ID NO: 12948 - DNA, 18 bp, Artificial Sequence
  Target HLA Sequence complement
agctgtggtcgctgctgt

SEQ ID NO: 12949 - DNA, 18 bp, Artificial Sequence
  Target HLA Sequence complement
gctgtggtcgctgctgtg

SEQ ID NO: 12950 - DNA, 18 bp, Artificial Sequence
  Target HLA Sequence complement
ctgtggtcgctgctgtga

SEQ ID NO: 12951 - DNA, 18 bp, Artificial Sequence
  Target HLA Sequence complement
gtggtcgctgctgtgatg

SEQ ID NO: 12952 - DNA, 18 bp, Artificial Sequence
  Target HLA Sequence complement
ggtcgctgctgtgatgtg

SEQ ID NO: 12953 - DNA, 18 bp, Artificial Sequence
  Target HLA Sequence complement
gtcgctgctgtgatgtgg

SEQ ID NO: 12954 - DNA, 18 bp, Artificial Sequence
  Target HLA Sequence complement
cgctgctgtgatgtggag

SEQ ID NO: 12955 - DNA, 18 bp, Artificial Sequence
  Target HLA Sequence complement
gctgctgtgatgtggagg

SEQ ID NO: 12956 - DNA, 18 bp, Artificial Sequence
  Target HLA Sequence complement
gctgtgatgtggaggagg

SEQ ID NO: 12957 - DNA, 18 bp, Artificial Sequence
  Target HLA Sequence complement
gtggaggaggaagagctc

SEQ ID NO: 12958 - DNA, 18 bp, Artificial Sequence
  Target HLA Sequence complement
ggaggaggaagagctcag

SEQ ID NO: 12959 - DNA, 18 bp, Artificial Sequence
  Target HLA Sequence complement
ggagggagctactctcag

SEQ ID NO: 12960 - DNA, 18 bp, Artificial Sequence
  Target HLA Sequence complement
gagggagctactctcagg

SEQ ID NO: 12961 - DNA, 18 bp, Artificial Sequence
  Target HLA Sequence complement
agggagctactctcaggc

SEQ ID NO: 12962 - DNA, 18 bp, Artificial Sequence
  Target HLA Sequence complement
gggagctactctcaggct

SEQ ID NO: 12963 - DNA, 18 bp, Artificial Sequence
  Target HLA Sequence complement
ggagctactctcaggctg

SEQ ID NO: 12964 - DNA, 18 bp, Artificial Sequence
  Target HLA Sequence complement
gagctactctcaggctgc

SEQ ID NO: 12965 - DNA, 18 bp, Artificial Sequence
  Target HLA Sequence complement
ctctcaggctgcaagcag

SEQ ID NO: 12966 - DNA, 18 bp, Artificial Sequence
  Target HLA Sequence complement
ctcaggctgcaagcagtg

SEQ ID NO: 12967 - DNA, 18 bp, Artificial Sequence
  Target HLA Sequence complement
caggctgcaagcagtgac

SEQ ID NO: 12968 - DNA, 18 bp, Artificial Sequence
  Target HLA Sequence complement
ggctgcaagcagtgacag

SEQ ID NO: 12969 - DNA, 18 bp, Artificial Sequence
  Target HLA Sequence complement
gcaagcagtgacagtgcc

SEQ ID NO: 12970 - DNA, 18 bp, Artificial Sequence
  Target HLA Sequence complement
caagcagtgacagtgccc

SEQ ID NO: 12971 - DNA, 18 bp, Artificial Sequence
  Target HLA Sequence complement
agcagtgacagtgcccag

SEQ ID NO: 12972 - DNA, 18 bp, Artificial Sequence
  Target HLA Sequence complement
gcagtgacagtgcccagg

SEQ ID NO: 12973 - DNA, 18 bp, Artificial Sequence
  Target HLA Sequence complement
cagtgacagtgcccaggg

SEQ ID NO: 12974 - DNA, 18 bp, Artificial Sequence
  Target HLA Sequence complement
agtgacagtgcccagggc

SEQ ID NO: 12975 - DNA, 18 bp, Artificial Sequence
  Target HLA Sequence complement
gtgacagtgcccagggct

SEQ ID NO: 12976 - DNA, 18 bp, Artificial Sequence
  Target HLA Sequence complement
tgacagtgcccagggctc

SEQ ID NO: 12977 - DNA, 18 bp, Artificial Sequence
  Target HLA Sequence complement
gacagtgcccagggctct

SEQ ID NO: 12978 - DNA, 18 bp, Artificial Sequence
  Target HLA Sequence complement
acagtgcccagggctctg

SEQ ID NO: 12979 - DNA, 18 bp, Artificial Sequence
  Target HLA Sequence complement
cagtgcccagggctctga

SEQ ID NO: 12980 - DNA, 18 bp, Artificial Sequence
  Target HLA Sequence complement
agtgcccagggctctgat

SEQ ID NO: 12981 - DNA, 18 bp, Artificial Sequence
  Target HLA Sequence complement
gtgcccagggctctgatg

SEQ ID NO: 12982 - DNA, 18 bp, Artificial Sequence
  Target HLA Sequence complement
tgcccagggctctgatgt

SEQ ID NO: 12983 - DNA, 18 bp, Artificial Sequence
  Target HLA Sequence complement
gcccagggctctgatgtg

SEQ ID NO: 12984 - DNA, 18 bp, Artificial Sequence
  Target HLA Sequence complement
cccagggctctgatgtgt

SEQ ID NO: 12985 - DNA, 18 bp, Artificial Sequence
  Target HLA Sequence complement
ccagggctctgatgtgtc

SEQ ID NO: 12986 - DNA, 18 bp, Artificial Sequence
  Target HLA Sequence complement
gacagctgccttgtgtgg

SEQ ID NO: 12987 - DNA, 18 bp, Artificial Sequence
  Target HLA Sequence complement
acagctgccttgtgtggg

SEQ ID NO: 12988 - DNA, 18 bp, Artificial Sequence
  Target HLA Sequence complement
cagctgccttgtgtggga

SEQ ID NO: 12989 - DNA, 18 bp, Artificial Sequence
  Target HLA Sequence complement
agctgccttgtgtgggac

SEQ ID NO: 12990 - DNA, 18 bp, Artificial Sequence
  Target HLA Sequence complement
gctgccttgtgtgggact

SEQ ID NO: 12991 - DNA, 18 bp, Artificial Sequence
  Target HLA Sequence complement
ctgccttgtgtgggactg

SEQ ID NO: 12992 - DNA, 18 bp, Artificial Sequence
  Target HLA Sequence complement
gccttgtgtgggactgag

SEQ ID NO: 12993 - DNA, 18 bp, Artificial Sequence
  Target HLA Sequence complement
tgtgtgggactgagaggc

SEQ ID NO: 12994 - DNA, 18 bp, Artificial Sequence
  Target HLA Sequence complement
gtgtgggactgagaggca

SEQ ID NO: 12995 - DNA, 18 bp, Artificial Sequence
  Target HLA Sequence complement
gtgggactgagaggcaag

SEQ ID NO: 12996 - DNA, 18 bp, Artificial Sequence
  Target HLA Sequence complement
gggactgagaggcaagag

SEQ ID NO: 12997 - DNA, 18 bp, Artificial Sequence
  Target HLA Sequence complement
gttgttcctgcccttccc

SEQ ID NO: 12998 - DNA, 18 bp, Artificial Sequence
  Target HLA Sequence complement
cctgcccttccctttgtg

SEQ ID NO: 12999 - DNA, 18 bp, Artificial Sequence
  Target HLA Sequence complement
ggcacctgcatgtgtctg

SEQ ID NO: 13000 - DNA, 18 bp, Artificial Sequence
  Target HLA Sequence complement
atgtgaggaggtggggag

SEQ ID NO: 13001 - DNA, 18 bp, Artificial Sequence
  Target HLA Sequence complement
tgtgaggaggtggggaga

SEQ ID NO: 13002 - DNA, 18 bp, Artificial Sequence
  Target HLA Sequence complement
gtgaggaggtggggagac

SEQ ID NO: 13003 - DNA, 18 bp, Artificial Sequence
  Target HLA Sequence complement
tgaggaggtggggagacc

SEQ ID NO: 13004 - DNA, 18 bp, Artificial Sequence
  Target HLA Sequence complement
gaggaggtggggagacca

SEQ ID NO: 13005 - DNA, 18 bp, Artificial Sequence
  Target HLA Sequence complement
aggaggtggggagaccac

SEQ ID NO: 13006 - DNA, 18 bp, Artificial Sequence
  Target HLA Sequence complement
ggaggtggggagaccacc

SEQ ID NO: 13007 - DNA, 18 bp, Artificial Sequence
  Target HLA Sequence complement
gaggtggggagaccaccc

SEQ ID NO: 13008 - DNA, 18 bp, Artificial Sequence
  Target HLA Sequence complement
aggtggggagaccacccc

SEQ ID NO: 13009 - DNA, 18 bp, Artificial Sequence
  Target HLA Sequence complement
ggtggggagaccacccca

SEQ ID NO: 13010 - DNA, 18 bp, Artificial Sequence
  Target HLA Sequence complement
gtggggagaccaccccac

SEQ ID NO: 13011 - DNA, 18 bp, Artificial Sequence
  Target HLA Sequence complement
tggggagaccaccccacc

SEQ ID NO: 13012 - DNA, 18 bp, Artificial Sequence
  Target HLA Sequence complement
ggggagaccaccccaccc

SEQ ID NO: 13013 - DNA, 18 bp, Artificial Sequence
  Target HLA Sequence complement
gggagaccaccccacccc

SEQ ID NO: 13014 - DNA, 18 bp, Artificial Sequence
  Target HLA Sequence complement
ggagaccaccccaccccc

SEQ ID NO: 13015 - DNA, 18 bp, Artificial Sequence
  Target HLA Sequence complement
gagaccaccccaccccca

SEQ ID NO: 13016 - DNA, 18 bp, Artificial Sequence
  Target HLA Sequence complement
agaccaccccacccccat

SEQ ID NO: 13017 - DNA, 18 bp, Artificial Sequence
  Target HLA Sequence complement
gaccaccccacccccatg

SEQ ID NO: 13018 - DNA, 18 bp, Artificial Sequence
  Target HLA Sequence complement
accaccccacccccatgt

SEQ ID NO: 13019 - DNA, 18 bp, Artificial Sequence
  Target HLA Sequence complement
ccaccccacccccatgtc

SEQ ID NO: 13020 - DNA, 18 bp, Artificial Sequence
  Target HLA Sequence complement
caccccacccccatgtcc

SEQ ID NO: 13021 - DNA, 18 bp, Artificial Sequence
  Target HLA Sequence complement
accccacccccatgtcca

SEQ ID NO: 13022 - DNA, 18 bp, Artificial Sequence
  Target HLA Sequence complement
ccccacccccatgtccac

SEQ ID NO: 13023 - DNA, 18 bp, Artificial Sequence
  Target HLA Sequence complement
cccacccccatgtccacc

SEQ ID NO: 13024 - DNA, 18 bp, Artificial Sequence
  Target HLA Sequence complement
ccacccccatgtccacca

SEQ ID NO: 13025 - DNA, 18 bp, Artificial Sequence
  Target HLA Sequence complement
cacccccatgtccaccat

SEQ ID NO: 13026 - DNA, 18 bp, Artificial Sequence
  Target HLA Sequence complement
acccccatgtccaccatg

SEQ ID NO: 13027 - DNA, 18 bp, Artificial Sequence
  Target HLA Sequence complement
cccccatgtccaccatga

SEQ ID NO: 13028 - DNA, 18 bp, Artificial Sequence
  Target HLA Sequence complement
ccccatgtccaccatgac

SEQ ID NO: 13029 - DNA, 18 bp, Artificial Sequence
  Target HLA Sequence complement
cccatgtccaccatgacc

SEQ ID NO: 13030 - DNA, 18 bp, Artificial Sequence
  Target HLA Sequence complement
ccatgtccaccatgaccc

SEQ ID NO: 13031 - DNA, 18 bp, Artificial Sequence
  Target HLA Sequence complement
ccaccatgaccctcttcc

SEQ ID NO: 13032 - DNA, 18 bp, Artificial Sequence
  Target HLA Sequence complement
caccatgaccctcttccc

SEQ ID NO: 13033 - DNA, 18 bp, Artificial Sequence
  Target HLA Sequence complement
ccatgaccctcttcccac

SEQ ID NO: 13034 - DNA, 18 bp, Artificial Sequence
  Target HLA Sequence complement
catgaccctcttcccacg

SEQ ID NO: 13035 - DNA, 18 bp, Artificial Sequence
  Target HLA Sequence complement
atgaccctcttcccacgc

SEQ ID NO: 13036 - DNA, 18 bp, Artificial Sequence
  Target HLA Sequence complement
tgaccctcttcccacgct

SEQ ID NO: 13037 - DNA, 18 bp, Artificial Sequence
  Target HLA Sequence complement
gaccctcttcccacgctg

SEQ ID NO: 13038 - DNA, 18 bp, Artificial Sequence
  Target HLA Sequence complement
accctcttcccacgctga

SEQ ID NO: 13039 - DNA, 18 bp, Artificial Sequence
  Target HLA Sequence complement
ccctcttcccacgctgac

SEQ ID NO: 13040 - DNA, 18 bp, Artificial Sequence
  Target HLA Sequence complement
cctcttcccacgctgacc

SEQ ID NO: 13041 - DNA, 18 bp, Artificial Sequence
  Target HLA Sequence complement
ctcttcccacgctgacct

SEQ ID NO: 13042 - DNA, 18 bp, Artificial Sequence
  Target HLA Sequence complement
tcttcccacgctgacctg

SEQ ID NO: 13043 - DNA, 18 bp, Artificial Sequence
  Target HLA Sequence complement
cttcccacgctgacctgt

SEQ ID NO: 13044 - DNA, 18 bp, Artificial Sequence
  Target HLA Sequence complement
ttcccacgctgacctgtg

SEQ ID NO: 13045 - DNA, 18 bp, Artificial Sequence
  Target HLA Sequence complement
tcccacgctgacctgtgc

SEQ ID NO: 13046 - DNA, 18 bp, Artificial Sequence
  Target HLA Sequence complement
cccacgctgacctgtgct

SEQ ID NO: 13047 - DNA, 18 bp, Artificial Sequence
  Target HLA Sequence complement
ccacgctgacctgtgctc

SEQ ID NO: 13048 - DNA, 18 bp, Artificial Sequence
  Target HLA Sequence complement
cacgctgacctgtgctcc

SEQ ID NO: 13049 - DNA, 18 bp, Artificial Sequence
  Target HLA Sequence complement
acgctgacctgtgctccc

SEQ ID NO: 13050 - DNA, 18 bp, Artificial Sequence
  Target HLA Sequence complement
cgctgacctgtgctccct

SEQ ID NO: 13051 - DNA, 18 bp, Artificial Sequence
  Target HLA Sequence complement
gctgacctgtgctccctc

SEQ ID NO: 13052 - DNA, 18 bp, Artificial Sequence
  Target HLA Sequence complement
ctgacctgtgctccctcc

SEQ ID NO: 13053 - DNA, 18 bp, Artificial Sequence
  Target HLA Sequence complement
tgacctgtgctccctccc

SEQ ID NO: 13054 - DNA, 18 bp, Artificial Sequence
  Target HLA Sequence complement
gacctgtgctccctcccc

SEQ ID NO: 13055 - DNA, 18 bp, Artificial Sequence
  Target HLA Sequence complement
acctgtgctccctcccca

SEQ ID NO: 13056 - DNA, 18 bp, Artificial Sequence
  Target HLA Sequence complement
cctgtgctccctccccaa

SEQ ID NO: 13057 - DNA, 18 bp, Artificial Sequence
  Target HLA Sequence complement
ctgtgctccctccccaat

SEQ ID NO: 13058 - DNA, 18 bp, Artificial Sequence
  Target HLA Sequence complement
tgtgctccctccccaatc

SEQ ID NO: 13059 - DNA, 18 bp, Artificial Sequence
  Target HLA Sequence complement
gtgctccctccccaatca

SEQ ID NO: 13060 - DNA, 18 bp, Artificial Sequence
  Target HLA Sequence complement
gctccctccccaatcatc

SEQ ID NO: 13061 - DNA, 18 bp, Artificial Sequence
  Target HLA Sequence complement
cctgttccagagaggtgg

SEQ ID NO: 13062 - DNA, 18 bp, Artificial Sequence
  Target HLA Sequence complement
ctgttccagagaggtggg

SEQ ID NO: 13063 - DNA, 18 bp, Artificial Sequence
  Target HLA Sequence complement
tgttccagagaggtgggg

SEQ ID NO: 13064 - DNA, 18 bp, Artificial Sequence
  Target HLA Sequence complement
gttccagagaggtggggc

SEQ ID NO: 13065 - DNA, 18 bp, Artificial Sequence
  Target HLA Sequence complement
ttccagagaggtggggct

SEQ ID NO: 13066 - DNA, 18 bp, Artificial Sequence
  Target HLA Sequence complement
tccagagaggtggggctg

SEQ ID NO: 13067 - DNA, 18 bp, Artificial Sequence
  Target HLA Sequence complement
ccagagaggtggggctga

SEQ ID NO: 13068 - DNA, 18 bp, Artificial Sequence
  Target HLA Sequence complement
cagagaggtggggctgag

SEQ ID NO: 13069 - DNA, 18 bp, Artificial Sequence
  Target HLA Sequence complement
agagaggtggggctgagg

SEQ ID NO: 13070 - DNA, 18 bp, Artificial Sequence
  Target HLA Sequence complement
gagaggtggggctgaggt

SEQ ID NO: 13071 - DNA, 18 bp, Artificial Sequence
  Target HLA Sequence complement
agaggtggggctgaggtg

SEQ ID NO: 13072 - DNA, 18 bp, Artificial Sequence
  Target HLA Sequence complement
gaggtggggctgaggtgt

SEQ ID NO: 13073 - DNA, 18 bp, Artificial Sequence
  Target HLA Sequence complement
aggtggggctgaggtgtc

SEQ ID NO: 13074 - DNA, 18 bp, Artificial Sequence
  Target HLA Sequence complement
ggtggggctgaggtgtct

SEQ ID NO: 13075 - DNA, 18 bp, Artificial Sequence
  Target HLA Sequence complement
gtggggctgaggtgtctc

SEQ ID NO: 13076 - DNA, 18 bp, Artificial Sequence
  Target HLA Sequence complement
tggggctgaggtgtctcc

SEQ ID NO: 13077 - DNA, 18 bp, Artificial Sequence
  Target HLA Sequence complement
ggggctgaggtgtctcca

SEQ ID NO: 13078 - DNA, 18 bp, Artificial Sequence
  Target HLA Sequence complement
gggctgaggtgtctccat

SEQ ID NO: 13079 - DNA, 18 bp, Artificial Sequence
  Target HLA Sequence complement
ggctgaggtgtctccatc

SEQ ID NO: 13080 - DNA, 19 bp, Artificial Sequence
  Target HLA Sequence complement
cagaagcagaggggtcagg

SEQ ID NO: 13081 - DNA, 19 bp, Artificial Sequence
  Target HLA Sequence complement
agaagcagaggggtcaggg

SEQ ID NO: 13082 - DNA, 19 bp, Artificial Sequence
  Target HLA Sequence complement
gaagcagaggggtcagggc

SEQ ID NO: 13083 - DNA, 19 bp, Artificial Sequence
  Target HLA Sequence complement
aagcagaggggtcagggcg

SEQ ID NO: 13084 - DNA, 19 bp, Artificial Sequence
  Target HLA Sequence complement
agcagaggggtcagggcga

SEQ ID NO: 13085 - DNA, 19 bp, Artificial Sequence
  Target HLA Sequence complement
gcagaggggtcagggcgaa

SEQ ID NO: 13086 - DNA, 19 bp, Artificial Sequence
  Target HLA Sequence complement
cagaggggtcagggcgaag

SEQ ID NO: 13087 - DNA, 19 bp, Artificial Sequence
  Target HLA Sequence complement
agaggggtcagggcgaagt

SEQ ID NO: 13088 - DNA, 19 bp, Artificial Sequence
  Target HLA Sequence complement
gaggggtcagggcgaagtc

SEQ ID NO: 13089 - DNA, 19 bp, Artificial Sequence
  Target HLA Sequence complement
aggggtcagggcgaagtcc

SEQ ID NO: 13090 - DNA, 19 bp, Artificial Sequence
  Target HLA Sequence complement
ggggtcagggcgaagtccc

SEQ ID NO: 13091 - DNA, 19 bp, Artificial Sequence
  Target HLA Sequence complement
gggtcagggcgaagtccca

SEQ ID NO: 13092 - DNA, 19 bp, Artificial Sequence
  Target HLA Sequence complement
ggtcagggcgaagtcccag

SEQ ID NO: 13093 - DNA, 19 bp, Artificial Sequence
  Target HLA Sequence complement
gtcagggcgaagtcccagg

SEQ ID NO: 13094 - DNA, 19 bp, Artificial Sequence
  Target HLA Sequence complement
tcagggcgaagtcccaggg

SEQ ID NO: 13095 - DNA, 19 bp, Artificial Sequence
  Target HLA Sequence complement
cagggcgaagtcccagggc

SEQ ID NO: 13096 - DNA, 19 bp, Artificial Sequence
  Target HLA Sequence complement
agggcgaagtcccagggcc

SEQ ID NO: 13097 - DNA, 19 bp, Artificial Sequence
  Target HLA Sequence complement
gggcgaagtcccagggccc

SEQ ID NO: 13098 - DNA, 19 bp, Artificial Sequence
  Target HLA Sequence complement
ggcgaagtcccagggcccc

SEQ ID NO: 13099 - DNA, 19 bp, Artificial Sequence
  Target HLA Sequence complement
gcgaagtcccagggcccca

SEQ ID NO: 13100 - DNA, 19 bp, Artificial Sequence
  Target HLA Sequence complement
cgaagtcccagggccccag

SEQ ID NO: 13101 - DNA, 19 bp, Artificial Sequence
  Target HLA Sequence complement
gaagtcccagggccccagg

SEQ ID NO: 13102 - DNA, 19 bp, Artificial Sequence
  Target HLA Sequence complement
aagtcccagggccccaggc

SEQ ID NO: 13103 - DNA, 19 bp, Artificial Sequence
  Target HLA Sequence complement
agtcccagggccccaggcg

SEQ ID NO: 13104 - DNA, 19 bp, Artificial Sequence
  Target HLA Sequence complement
gtcccagggccccaggcgt

SEQ ID NO: 13105 - DNA, 19 bp, Artificial Sequence
  Target HLA Sequence complement
tcccagggccccaggcgtg

SEQ ID NO: 13106 - DNA, 19 bp, Artificial Sequence
  Target HLA Sequence complement
cccagggccccaggcgtgg

SEQ ID NO: 13107 - DNA, 19 bp, Artificial Sequence
  Target HLA Sequence complement
ccagggccccaggcgtggc

SEQ ID NO: 13108 - DNA, 19 bp, Artificial Sequence
  Target HLA Sequence complement
cagggccccaggcgtggct

SEQ ID NO: 13109 - DNA, 19 bp, Artificial Sequence
  Target HLA Sequence complement
agggccccaggcgtggctc

SEQ ID NO: 13110 - DNA, 19 bp, Artificial Sequence
  Target HLA Sequence complement
gggccccaggcgtggctct

SEQ ID NO: 13111 - DNA, 19 bp, Artificial Sequence
  Target HLA Sequence complement
ggccccaggcgtggctctc

SEQ ID NO: 13112 - DNA, 19 bp, Artificial Sequence
  Target HLA Sequence complement
gccccaggcgtggctctca

SEQ ID NO: 13113 - DNA, 19 bp, Artificial Sequence
  Target HLA Sequence complement
ccccaggcgtggctctcag

SEQ ID NO: 13114 - DNA, 19 bp, Artificial Sequence
  Target HLA Sequence complement
cccaggcgtggctctcagg

SEQ ID NO: 13115 - DNA, 19 bp, Artificial Sequence
  Target HLA Sequence complement
ccaggcgtggctctcaggg

SEQ ID NO: 13116 - DNA, 19 bp, Artificial Sequence
  Target HLA Sequence complement
caggcgtggctctcagggt

SEQ ID NO: 13117 - DNA, 19 bp, Artificial Sequence
  Target HLA Sequence complement
aggcgtggctctcagggtc

SEQ ID NO: 13118 - DNA, 19 bp, Artificial Sequence
  Target HLA Sequence complement
ggcgtggctctcagggtct

SEQ ID NO: 13119 - DNA, 19 bp, Artificial Sequence
  Target HLA Sequence complement
gcgtggctctcagggtctc

SEQ ID NO: 13120 - DNA, 19 bp, Artificial Sequence
  Target HLA Sequence complement
cgtggctctcagggtctca

SEQ ID NO: 13121 - DNA, 19 bp, Artificial Sequence
  Target HLA Sequence complement
gtggctctcagggtctcag

SEQ ID NO: 13122 - DNA, 19 bp, Artificial Sequence
  Target HLA Sequence complement
tggctctcagggtctcagg

SEQ ID NO: 13123 - DNA, 19 bp, Artificial Sequence
  Target HLA Sequence complement
ggctctcagggtctcaggc

SEQ ID NO: 13124 - DNA, 19 bp, Artificial Sequence
  Target HLA Sequence complement
gctctcagggtctcaggcc

SEQ ID NO: 13125 - DNA, 19 bp, Artificial Sequence
  Target HLA Sequence complement
ctctcagggtctcaggccc

SEQ ID NO: 13126 - DNA, 19 bp, Artificial Sequence
  Target HLA Sequence complement
tctcagggtctcaggcccc

SEQ ID NO: 13127 - DNA, 19 bp, Artificial Sequence
  Target HLA Sequence complement
ctcagggtctcaggccccg

SEQ ID NO: 13128 - DNA, 19 bp, Artificial Sequence
  Target HLA Sequence complement
tcagggtctcaggccccga

SEQ ID NO: 13129 - DNA, 19 bp, Artificial Sequence
  Target HLA Sequence complement
cagggtctcaggccccgaa

SEQ ID NO: 13130 - DNA, 19 bp, Artificial Sequence
  Target HLA Sequence complement
agggtctcaggccccgaag

SEQ ID NO: 13131 - DNA, 19 bp, Artificial Sequence
  Target HLA Sequence complement
gggtctcaggccccgaagg

SEQ ID NO: 13132 - DNA, 19 bp, Artificial Sequence
  Target HLA Sequence complement
ggtctcaggccccgaaggc

SEQ ID NO: 13133 - DNA, 19 bp, Artificial Sequence
  Target HLA Sequence complement
gtctcaggccccgaaggcg

SEQ ID NO: 13134 - DNA, 19 bp, Artificial Sequence
  Target HLA Sequence complement
tctcaggccccgaaggcgg

SEQ ID NO: 13135 - DNA, 19 bp, Artificial Sequence
  Target HLA Sequence complement
ctcaggccccgaaggcggt

SEQ ID NO: 13136 - DNA, 19 bp, Artificial Sequence
  Target HLA Sequence complement
tcaggccccgaaggcggtg

SEQ ID NO: 13137 - DNA, 19 bp, Artificial Sequence
  Target HLA Sequence complement
caggccccgaaggcggtgt

SEQ ID NO: 13138 - DNA, 19 bp, Artificial Sequence
  Target HLA Sequence complement
aggccccgaaggcggtgta

SEQ ID NO: 13139 - DNA, 19 bp, Artificial Sequence
  Target HLA Sequence complement
ggccccgaaggcggtgtat

SEQ ID NO: 13140 - DNA, 19 bp, Artificial Sequence
  Target HLA Sequence complement
gccccgaaggcggtgtatg

SEQ ID NO: 13141 - DNA, 19 bp, Artificial Sequence
  Target HLA Sequence complement
ccccgaaggcggtgtatgg

SEQ ID NO: 13142 - DNA, 19 bp, Artificial Sequence
  Target HLA Sequence complement
cccgaaggcggtgtatgga

SEQ ID NO: 13143 - DNA, 19 bp, Artificial Sequence
  Target HLA Sequence complement
ggcggtgtatggattgggg

SEQ ID NO: 13144 - DNA, 19 bp, Artificial Sequence
  Target HLA Sequence complement
tggattggggagtcccagc

SEQ ID NO: 13145 - DNA, 19 bp, Artificial Sequence
  Target HLA Sequence complement
ggattggggagtcccagcc

SEQ ID NO: 13146 - DNA, 19 bp, Artificial Sequence
  Target HLA Sequence complement
gattggggagtcccagcct

SEQ ID NO: 13147 - DNA, 19 bp, Artificial Sequence
  Target HLA Sequence complement
ttggggagtcccagccttg

SEQ ID NO: 13148 - DNA, 19 bp, Artificial Sequence
  Target HLA Sequence complement
tggggagtcccagccttgg

SEQ ID NO: 13149 - DNA, 19 bp, Artificial Sequence
  Target HLA Sequence complement
ggggagtcccagccttggg

SEQ ID NO: 13150 - DNA, 19 bp, Artificial Sequence
  Target HLA Sequence complement
gggagtcccagccttgggg

SEQ ID NO: 13151 - DNA, 19 bp, Artificial Sequence
  Target HLA Sequence complement
ggagtcccagccttgggga

SEQ ID NO: 13152 - DNA, 19 bp, Artificial Sequence
  Target HLA Sequence complement
gagtcccagccttggggat

SEQ ID NO: 13153 - DNA, 19 bp, Artificial Sequence
  Target HLA Sequence complement
gtcccagccttggggattc

SEQ ID NO: 13154 - DNA, 19 bp, Artificial Sequence
  Target HLA Sequence complement
tcccagccttggggattcc

SEQ ID NO: 13155 - DNA, 19 bp, Artificial Sequence
  Target HLA Sequence complement
cccagccttggggattccc

SEQ ID NO: 13156 - DNA, 19 bp, Artificial Sequence
  Target HLA Sequence complement
ccagccttggggattcccc

SEQ ID NO: 13157 - DNA, 19 bp, Artificial Sequence
  Target HLA Sequence complement
cagccttggggattcccca

SEQ ID NO: 13158 - DNA, 19 bp, Artificial Sequence
  Target HLA Sequence complement
gccttggggattccccaac

SEQ ID NO: 13159 - DNA, 19 bp, Artificial Sequence
  Target HLA Sequence complement
tggggattccccaactccg

SEQ ID NO: 13160 - DNA, 19 bp, Artificial Sequence
  Target HLA Sequence complement
ggggattccccaactccgc

SEQ ID NO: 13161 - DNA, 19 bp, Artificial Sequence
  Target HLA Sequence complement
gggattccccaactccgca

SEQ ID NO: 13162 - DNA, 19 bp, Artificial Sequence
  Target HLA Sequence complement
ggattccccaactccgcag

SEQ ID NO: 13163 - DNA, 19 bp, Artificial Sequence
  Target HLA Sequence complement
cctggatactcacgacgcg

SEQ ID NO: 13164 - DNA, 19 bp, Artificial Sequence
  Target HLA Sequence complement
ctggatactcacgacgcgg

SEQ ID NO: 13165 - DNA, 19 bp, Artificial Sequence
  Target HLA Sequence complement
ggatactcacgacgcggac

SEQ ID NO: 13166 - DNA, 19 bp, Artificial Sequence
  Target HLA Sequence complement
gatactcacgacgcggacc

SEQ ID NO: 13167 - DNA, 19 bp, Artificial Sequence
  Target HLA Sequence complement
atactcacgacgcggaccc

SEQ ID NO: 13168 - DNA, 19 bp, Artificial Sequence
  Target HLA Sequence complement
tactcacgacgcggaccca

SEQ ID NO: 13169 - DNA, 19 bp, Artificial Sequence
  Target HLA Sequence complement
actcacgacgcggacccag

SEQ ID NO: 13170 - DNA, 19 bp, Artificial Sequence
  Target HLA Sequence complement
ctcacgacgcggacccagt

SEQ ID NO: 13171 - DNA, 19 bp, Artificial Sequence
  Target HLA Sequence complement
tcacgacgcggacccagtt

SEQ ID NO: 13172 - DNA, 19 bp, Artificial Sequence
  Target HLA Sequence complement
cacgacgcggacccagttc

SEQ ID NO: 13173 - DNA, 19 bp, Artificial Sequence
  Target HLA Sequence complement
acgacgcggacccagttct

SEQ ID NO: 13174 - DNA, 19 bp, Artificial Sequence
  Target HLA Sequence complement
cgacgcggacccagttctc

SEQ ID NO: 13175 - DNA, 19 bp, Artificial Sequence
  Target HLA Sequence complement
gacgcggacccagttctca

SEQ ID NO: 13176 - DNA, 19 bp, Artificial Sequence
  Target HLA Sequence complement
acgcggacccagttctcac

SEQ ID NO: 13177 - DNA, 19 bp, Artificial Sequence
  Target HLA Sequence complement
cgcggacccagttctcact

SEQ ID NO: 13178 - DNA, 19 bp, Artificial Sequence
  Target HLA Sequence complement
gcggacccagttctcactc

SEQ ID NO: 13179 - DNA, 19 bp, Artificial Sequence
  Target HLA Sequence complement
cggacccagttctcactcc

SEQ ID NO: 13180 - DNA, 19 bp, Artificial Sequence
  Target HLA Sequence complement
ggacccagttctcactccc

SEQ ID NO: 13181 - DNA, 19 bp, Artificial Sequence
  Target HLA Sequence complement
cactcccattgggtgtcgg

SEQ ID NO: 13182 - DNA, 19 bp, Artificial Sequence
  Target HLA Sequence complement
actcccattgggtgtcggg

SEQ ID NO: 13183 - DNA, 19 bp, Artificial Sequence
  Target HLA Sequence complement
ctcccattgggtgtcgggt

SEQ ID NO: 13184 - DNA, 19 bp, Artificial Sequence
  Target HLA Sequence complement
gggtgtcgggtttccagag

SEQ ID NO: 13185 - DNA, 19 bp, Artificial Sequence
  Target HLA Sequence complement
ccaatcagtgtcgtcgcgg

SEQ ID NO: 13186 - DNA, 19 bp, Artificial Sequence
  Target HLA Sequence complement
atcagtgtcgtcgcggtcg

SEQ ID NO: 13187 - DNA, 19 bp, Artificial Sequence
  Target HLA Sequence complement
tcagtgtcgtcgcggtcgc

SEQ ID NO: 13188 - DNA, 19 bp, Artificial Sequence
  Target HLA Sequence complement
cagtgtcgtcgcggtcgcg

SEQ ID NO: 13189 - DNA, 19 bp, Artificial Sequence
  Target HLA Sequence complement
agtgtcgtcgcggtcgcgg

SEQ ID NO: 13190 - DNA, 19 bp, Artificial Sequence
  Target HLA Sequence complement
gtgtcgtcgcggtcgcggt

SEQ ID NO: 13191 - DNA, 19 bp, Artificial Sequence
  Target HLA Sequence complement
tgtcgtcgcggtcgcggtt

SEQ ID NO: 13192 - DNA, 19 bp, Artificial Sequence
  Target HLA Sequence complement
gtcgtcgcggtcgcggttc

SEQ ID NO: 13193 - DNA, 19 bp, Artificial Sequence
  Target HLA Sequence complement
tcgtcgcggtcgcggttct

SEQ ID NO: 13194 - DNA, 19 bp, Artificial Sequence
  Target HLA Sequence complement
cgtcgcggtcgcggttcta

SEQ ID NO: 13195 - DNA, 19 bp, Artificial Sequence
  Target HLA Sequence complement
gtcgcggtcgcggttctaa

SEQ ID NO: 13196 - DNA, 19 bp, Artificial Sequence
  Target HLA Sequence complement
cgcggtcgcggttctaaag

SEQ ID NO: 13197 - DNA, 19 bp, Artificial Sequence
  Target HLA Sequence complement
ctaaagtccgcacgcaccc

SEQ ID NO: 13198 - DNA, 19 bp, Artificial Sequence
  Target HLA Sequence complement
aaagtccgcacgcacccac

SEQ ID NO: 13199 - DNA, 19 bp, Artificial Sequence
  Target HLA Sequence complement
aagtccgcacgcacccacc

SEQ ID NO: 13200 - DNA, 19 bp, Artificial Sequence
  Target HLA Sequence complement
agtccgcacgcacccaccg

SEQ ID NO: 13201 - DNA, 19 bp, Artificial Sequence
  Target HLA Sequence complement
gtccgcacgcacccaccgg

SEQ ID NO: 13202 - DNA, 19 bp, Artificial Sequence
  Target HLA Sequence complement
tccgcacgcacccaccggg

SEQ ID NO: 13203 - DNA, 19 bp, Artificial Sequence
  Target HLA Sequence complement
ccgcacgcacccaccggga

SEQ ID NO: 13204 - DNA, 19 bp, Artificial Sequence
  Target HLA Sequence complement
cgcacgcacccaccgggac

SEQ ID NO: 13205 - DNA, 19 bp, Artificial Sequence
  Target HLA Sequence complement
gcacgcacccaccgggact

SEQ ID NO: 13206 - DNA, 19 bp, Artificial Sequence
  Target HLA Sequence complement
cacgcacccaccgggactc

SEQ ID NO: 13207 - DNA, 19 bp, Artificial Sequence
  Target HLA Sequence complement
acgcacccaccgggactca

SEQ ID NO: 13208 - DNA, 19 bp, Artificial Sequence
  Target HLA Sequence complement
cgcacccaccgggactcag

SEQ ID NO: 13209 - DNA, 19 bp, Artificial Sequence
  Target HLA Sequence complement
gcacccaccgggactcaga

SEQ ID NO: 13210 - DNA, 19 bp, Artificial Sequence
  Target HLA Sequence complement
cacccaccgggactcagat

SEQ ID NO: 13211 - DNA, 19 bp, Artificial Sequence
  Target HLA Sequence complement
cccaccgggactcagattc

SEQ ID NO: 13212 - DNA, 19 bp, Artificial Sequence
  Target HLA Sequence complement
ccgggactcagattctccc

SEQ ID NO: 13213 - DNA, 19 bp, Artificial Sequence
  Target HLA Sequence complement
cgggactcagattctcccc

SEQ ID NO: 13214 - DNA, 19 bp, Artificial Sequence
  Target HLA Sequence complement
cagattctccccagacgcc

SEQ ID NO: 13215 - DNA, 19 bp, Artificial Sequence
  Target HLA Sequence complement
agattctccccagacgccg

SEQ ID NO: 13216 - DNA, 19 bp, Artificial Sequence
  Target HLA Sequence complement
gattctccccagacgccga

SEQ ID NO: 13217 - DNA, 19 bp, Artificial Sequence
  Target HLA Sequence complement
attctccccagacgccgag

SEQ ID NO: 13218 - DNA, 19 bp, Artificial Sequence
  Target HLA Sequence complement
ttctccccagacgccgagg

SEQ ID NO: 13219 - DNA, 19 bp, Artificial Sequence
  Target HLA Sequence complement
tctccccagacgccgagga

SEQ ID NO: 13220 - DNA, 19 bp, Artificial Sequence
  Target HLA Sequence complement
ctccccagacgccgaggat

SEQ ID NO: 13221 - DNA, 19 bp, Artificial Sequence
  Target HLA Sequence complement
tccccagacgccgaggatg

SEQ ID NO: 13222 - DNA, 19 bp, Artificial Sequence
  Target HLA Sequence complement
ccccagacgccgaggatgg

SEQ ID NO: 13223 - DNA, 19 bp, Artificial Sequence
  Target HLA Sequence complement
cccagacgccgaggatggc

SEQ ID NO: 13224 - DNA, 19 bp, Artificial Sequence
  Target HLA Sequence complement
ccagacgccgaggatggcc

SEQ ID NO: 13225 - DNA, 19 bp, Artificial Sequence
  Target HLA Sequence complement
cagacgccgaggatggccg

SEQ ID NO: 13226 - DNA, 19 bp, Artificial Sequence
  Target HLA Sequence complement
agacgccgaggatggccgt

SEQ ID NO: 13227 - DNA, 19 bp, Artificial Sequence
  Target HLA Sequence complement
gacgccgaggatggccgtc

SEQ ID NO: 13228 - DNA, 19 bp, Artificial Sequence
  Target HLA Sequence complement
acgccgaggatggccgtca

SEQ ID NO: 13229 - DNA, 19 bp, Artificial Sequence
  Target HLA Sequence complement
cgccgaggatggccgtcat

SEQ ID NO: 13230 - DNA, 19 bp, Artificial Sequence
  Target HLA Sequence complement
gccgaggatggccgtcatg

SEQ ID NO: 13231 - DNA, 19 bp, Artificial Sequence
  Target HLA Sequence complement
ccgaggatggccgtcatgg

SEQ ID NO: 13232 - DNA, 19 bp, Artificial Sequence
  Target HLA Sequence complement
cgaggatggccgtcatggc

SEQ ID NO: 13233 - DNA, 19 bp, Artificial Sequence
  Target HLA Sequence complement
gaggatggccgtcatggcg

SEQ ID NO: 13234 - DNA, 19 bp, Artificial Sequence
  Target HLA Sequence complement
aggatggccgtcatggcgc

SEQ ID NO: 13235 - DNA, 19 bp, Artificial Sequence
  Target HLA Sequence complement
ggatggccgtcatggcgcc

SEQ ID NO: 13236 - DNA, 19 bp, Artificial Sequence
  Target HLA Sequence complement
gatggccgtcatggcgccc

SEQ ID NO: 13237 - DNA, 19 bp, Artificial Sequence
  Target HLA Sequence complement
atggccgtcatggcgcccc

SEQ ID NO: 13238 - DNA, 19 bp, Artificial Sequence
  Target HLA Sequence complement
tggccgtcatggcgccccg

SEQ ID NO: 13239 - DNA, 19 bp, Artificial Sequence
  Target HLA Sequence complement
ggccgtcatggcgccccga

SEQ ID NO: 13240 - DNA, 19 bp, Artificial Sequence
  Target HLA Sequence complement
gccgtcatggcgccccgaa

SEQ ID NO: 13241 - DNA, 19 bp, Artificial Sequence
  Target HLA Sequence complement
ccgtcatggcgccccgaac

SEQ ID NO: 13242 - DNA, 19 bp, Artificial Sequence
  Target HLA Sequence complement
cgtcatggcgccccgaacc

SEQ ID NO: 13243 - DNA, 19 bp, Artificial Sequence
  Target HLA Sequence complement
gtcatggcgccccgaaccc

SEQ ID NO: 13244 - DNA, 19 bp, Artificial Sequence
  Target HLA Sequence complement
tcatggcgccccgaaccct

SEQ ID NO: 13245 - DNA, 19 bp, Artificial Sequence
  Target HLA Sequence complement
catggcgccccgaaccctc

SEQ ID NO: 13246 - DNA, 19 bp, Artificial Sequence
  Target HLA Sequence complement
atggcgccccgaaccctcg

SEQ ID NO: 13247 - DNA, 19 bp, Artificial Sequence
  Target HLA Sequence complement
tggcgccccgaaccctcgt

SEQ ID NO: 13248 - DNA, 19 bp, Artificial Sequence
  Target HLA Sequence complement
ggcgccccgaaccctcgtc

SEQ ID NO: 13249 - DNA, 19 bp, Artificial Sequence
  Target HLA Sequence complement
gcgccccgaaccctcgtcc

SEQ ID NO: 13250 - DNA, 19 bp, Artificial Sequence
  Target HLA Sequence complement
cgccccgaaccctcgtcct

SEQ ID NO: 13251 - DNA, 19 bp, Artificial Sequence
  Target HLA Sequence complement
gccccgaaccctcgtcctg

SEQ ID NO: 13252 - DNA, 19 bp, Artificial Sequence
  Target HLA Sequence complement
ccccgaaccctcgtcctgc

SEQ ID NO: 13253 - DNA, 19 bp, Artificial Sequence
  Target HLA Sequence complement
cccgaaccctcgtcctgct

SEQ ID NO: 13254 - DNA, 19 bp, Artificial Sequence
  Target HLA Sequence complement
ccgaaccctcgtcctgcta

SEQ ID NO: 13255 - DNA, 19 bp, Artificial Sequence
  Target HLA Sequence complement
cgaaccctcgtcctgctac

SEQ ID NO: 13256 - DNA, 19 bp, Artificial Sequence
  Target HLA Sequence complement
ccctcgtcctgctactctc

SEQ ID NO: 13257 - DNA, 19 bp, Artificial Sequence
  Target HLA Sequence complement
cctcgtcctgctactctcg

SEQ ID NO: 13258 - DNA, 19 bp, Artificial Sequence
  Target HLA Sequence complement
ctcgtcctgctactctcgg

SEQ ID NO: 13259 - DNA, 19 bp, Artificial Sequence
  Target HLA Sequence complement
tcgtcctgctactctcggg

SEQ ID NO: 13260 - DNA, 19 bp, Artificial Sequence
  Target HLA Sequence complement
cgtcctgctactctcgggg

SEQ ID NO: 13261 - DNA, 19 bp, Artificial Sequence
  Target HLA Sequence complement
gtcctgctactctcggggg

SEQ ID NO: 13262 - DNA, 19 bp, Artificial Sequence
  Target HLA Sequence complement
tcctgctactctcgggggc

SEQ ID NO: 13263 - DNA, 19 bp, Artificial Sequence
  Target HLA Sequence complement
cctgctactctcgggggct

SEQ ID NO: 13264 - DNA, 19 bp, Artificial Sequence
  Target HLA Sequence complement
ctgctactctcgggggctc

SEQ ID NO: 13265 - DNA, 19 bp, Artificial Sequence
  Target HLA Sequence complement
tgctactctcgggggctct

SEQ ID NO: 13266 - DNA, 19 bp, Artificial Sequence
  Target HLA Sequence complement
gctactctcgggggctctg

SEQ ID NO: 13267 - DNA, 19 bp, Artificial Sequence
  Target HLA Sequence complement
ctactctcgggggctctgg

SEQ ID NO: 13268 - DNA, 19 bp, Artificial Sequence
  Target HLA Sequence complement
tactctcgggggctctggc

SEQ ID NO: 13269 - DNA, 19 bp, Artificial Sequence
  Target HLA Sequence complement
actctcgggggctctggcc

SEQ ID NO: 13270 - DNA, 19 bp, Artificial Sequence
  Target HLA Sequence complement
ctctcgggggctctggccc

SEQ ID NO: 13271 - DNA, 19 bp, Artificial Sequence
  Target HLA Sequence complement
tctcgggggctctggccct

SEQ ID NO: 13272 - DNA, 19 bp, Artificial Sequence
  Target HLA Sequence complement
ctcgggggctctggccctg

SEQ ID NO: 13273 - DNA, 19 bp, Artificial Sequence
  Target HLA Sequence complement
tcgggggctctggccctga

SEQ ID NO: 13274 - DNA, 19 bp, Artificial Sequence
  Target HLA Sequence complement
cgggggctctggccctgac

SEQ ID NO: 13275 - DNA, 19 bp, Artificial Sequence
  Target HLA Sequence complement
gggggctctggccctgacc

SEQ ID NO: 13276 - DNA, 19 bp, Artificial Sequence
  Target HLA Sequence complement
ggggctctggccctgaccc

SEQ ID NO: 13277 - DNA, 19 bp, Artificial Sequence
  Target HLA Sequence complement
gggctctggccctgaccca

SEQ ID NO: 13278 - DNA, 19 bp, Artificial Sequence
  Target HLA Sequence complement
ggctctggccctgacccag

SEQ ID NO: 13279 - DNA, 19 bp, Artificial Sequence
  Target HLA Sequence complement
gctctggccctgacccaga

SEQ ID NO: 13280 - DNA, 19 bp, Artificial Sequence
  Target HLA Sequence complement
ctctggccctgacccagac

SEQ ID NO: 13281 - DNA, 19 bp, Artificial Sequence
  Target HLA Sequence complement
tctggccctgacccagacc

SEQ ID NO: 13282 - DNA, 19 bp, Artificial Sequence
  Target HLA Sequence complement
ctggccctgacccagacct

SEQ ID NO: 13283 - DNA, 19 bp, Artificial Sequence
  Target HLA Sequence complement
tggccctgacccagacctg

SEQ ID NO: 13284 - DNA, 19 bp, Artificial Sequence
  Target HLA Sequence complement
ggccctgacccagacctgg

SEQ ID NO: 13285 - DNA, 19 bp, Artificial Sequence
  Target HLA Sequence complement
gccctgacccagacctggg

SEQ ID NO: 13286 - DNA, 19 bp, Artificial Sequence
  Target HLA Sequence complement
ccctgacccagacctgggc

SEQ ID NO: 13287 - DNA, 19 bp, Artificial Sequence
  Target HLA Sequence complement
cctgacccagacctgggcg

SEQ ID NO: 13288 - DNA, 19 bp, Artificial Sequence
  Target HLA Sequence complement
ctgacccagacctgggcgg

SEQ ID NO: 13289 - DNA, 19 bp, Artificial Sequence
  Target HLA Sequence complement
tgacccagacctgggcggg

SEQ ID NO: 13290 - DNA, 19 bp, Artificial Sequence
  Target HLA Sequence complement
gacccagacctgggcgggc

SEQ ID NO: 13291 - DNA, 19 bp, Artificial Sequence
  Target HLA Sequence complement
acccagacctgggcgggct

SEQ ID NO: 13292 - DNA, 19 bp, Artificial Sequence
  Target HLA Sequence complement
cccagacctgggcgggctc

SEQ ID NO: 13293 - DNA, 19 bp, Artificial Sequence
  Target HLA Sequence complement
ccagacctgggcgggctct

SEQ ID NO: 13294 - DNA, 19 bp, Artificial Sequence
  Target HLA Sequence complement
cagacctgggcgggctctc

SEQ ID NO: 13295 - DNA, 19 bp, Artificial Sequence
  Target HLA Sequence complement
agacctgggcgggctctca

SEQ ID NO: 13296 - DNA, 19 bp, Artificial Sequence
  Target HLA Sequence complement
gacctgggcgggctctcac

SEQ ID NO: 13297 - DNA, 19 bp, Artificial Sequence
  Target HLA Sequence complement
acctgggcgggctctcact

SEQ ID NO: 13298 - DNA, 19 bp, Artificial Sequence
  Target HLA Sequence complement
cctgggcgggctctcactc

SEQ ID NO: 13299 - DNA, 19 bp, Artificial Sequence
  Target HLA Sequence complement
ctgggcgggctctcactcc

SEQ ID NO: 13300 - DNA, 19 bp, Artificial Sequence
  Target HLA Sequence complement
tgggcgggctctcactcca

SEQ ID NO: 13301 - DNA, 19 bp, Artificial Sequence
  Target HLA Sequence complement
gggcgggctctcactccat

SEQ ID NO: 13302 - DNA, 19 bp, Artificial Sequence
  Target HLA Sequence complement
ggcgggctctcactccatg

SEQ ID NO: 13303 - DNA, 19 bp, Artificial Sequence
  Target HLA Sequence complement
gcgggctctcactccatga

SEQ ID NO: 13304 - DNA, 19 bp, Artificial Sequence
  Target HLA Sequence complement
cgggctctcactccatgag

SEQ ID NO: 13305 - DNA, 19 bp, Artificial Sequence
  Target HLA Sequence complement
gggctctcactccatgagg

SEQ ID NO: 13306 - DNA, 19 bp, Artificial Sequence
  Target HLA Sequence complement
cttcacatccgtgtcccgg

SEQ ID NO: 13307 - DNA, 19 bp, Artificial Sequence
  Target HLA Sequence complement
ttcacatccgtgtcccggc

SEQ ID NO: 13308 - DNA, 19 bp, Artificial Sequence
  Target HLA Sequence complement
tcacatccgtgtcccggcc

SEQ ID NO: 13309 - DNA, 19 bp, Artificial Sequence
  Target HLA Sequence complement
cacatccgtgtcccggccc

SEQ ID NO: 13310 - DNA, 19 bp, Artificial Sequence
  Target HLA Sequence complement
acatccgtgtcccggcccg

SEQ ID NO: 13311 - DNA, 19 bp, Artificial Sequence
  Target HLA Sequence complement
catccgtgtcccggcccgg

SEQ ID NO: 13312 - DNA, 19 bp, Artificial Sequence
  Target HLA Sequence complement
atccgtgtcccggcccggc

SEQ ID NO: 13313 - DNA, 19 bp, Artificial Sequence
  Target HLA Sequence complement
tccgtgtcccggcccggcc

SEQ ID NO: 13314 - DNA, 19 bp, Artificial Sequence
  Target HLA Sequence complement
ccgtgtcccggcccggccg

SEQ ID NO: 13315 - DNA, 19 bp, Artificial Sequence
  Target HLA Sequence complement
cgtgtcccggcccggccgc

SEQ ID NO: 13316 - DNA, 19 bp, Artificial Sequence
  Target HLA Sequence complement
gtgtcccggcccggccgcg

SEQ ID NO: 13317 - DNA, 19 bp, Artificial Sequence
  Target HLA Sequence complement
tgtcccggcccggccgcgg

SEQ ID NO: 13318 - DNA, 19 bp, Artificial Sequence
  Target HLA Sequence complement
gtcccggcccggccgcggg

SEQ ID NO: 13319 - DNA, 19 bp, Artificial Sequence
  Target HLA Sequence complement
tcccggcccggccgcgggg

SEQ ID NO: 13320 - DNA, 19 bp, Artificial Sequence
  Target HLA Sequence complement
cccggcccggccgcgggga

SEQ ID NO: 13321 - DNA, 19 bp, Artificial Sequence
  Target HLA Sequence complement
ccggcccggccgcggggag

SEQ ID NO: 13322 - DNA, 19 bp, Artificial Sequence
  Target HLA Sequence complement
cggcccggccgcggggagc

SEQ ID NO: 13323 - DNA, 19 bp, Artificial Sequence
  Target HLA Sequence complement
ggcccggccgcggggagcc

SEQ ID NO: 13324 - DNA, 19 bp, Artificial Sequence
  Target HLA Sequence complement
gcccggccgcggggagccc

SEQ ID NO: 13325 - DNA, 19 bp, Artificial Sequence
  Target HLA Sequence complement
cccggccgcggggagcccc

SEQ ID NO: 13326 - DNA, 19 bp, Artificial Sequence
  Target HLA Sequence complement
ccggccgcggggagccccg

SEQ ID NO: 13327 - DNA, 19 bp, Artificial Sequence
  Target HLA Sequence complement
cggccgcggggagccccgc

SEQ ID NO: 13328 - DNA, 19 bp, Artificial Sequence
  Target HLA Sequence complement
ggccgcggggagccccgct

SEQ ID NO: 13329 - DNA, 19 bp, Artificial Sequence
  Target HLA Sequence complement
gccgcggggagccccgctt

SEQ ID NO: 13330 - DNA, 19 bp, Artificial Sequence
  Target HLA Sequence complement
ccgcggggagccccgcttc

SEQ ID NO: 13331 - DNA, 19 bp, Artificial Sequence
  Target HLA Sequence complement
cgcggggagccccgcttca

SEQ ID NO: 13332 - DNA, 19 bp, Artificial Sequence
  Target HLA Sequence complement
gcggggagccccgcttcat

SEQ ID NO: 13333 - DNA, 19 bp, Artificial Sequence
  Target HLA Sequence complement
cggggagccccgcttcatc

SEQ ID NO: 13334 - DNA, 19 bp, Artificial Sequence
  Target HLA Sequence complement
ggggagccccgcttcatcg

SEQ ID NO: 13335 - DNA, 19 bp, Artificial Sequence
  Target HLA Sequence complement
gggagccccgcttcatcgc

SEQ ID NO: 13336 - DNA, 19 bp, Artificial Sequence
  Target HLA Sequence complement
ggagccccgcttcatcgca

SEQ ID NO: 13337 - DNA, 19 bp, Artificial Sequence
  Target HLA Sequence complement
gagccccgcttcatcgcag

SEQ ID NO: 13338 - DNA, 19 bp, Artificial Sequence
  Target HLA Sequence complement
agccccgcttcatcgcagt

SEQ ID NO: 13339 - DNA, 19 bp, Artificial Sequence
  Target HLA Sequence complement
gccccgcttcatcgcagtg

SEQ ID NO: 13340 - DNA, 19 bp, Artificial Sequence
  Target HLA Sequence complement
ccccgcttcatcgcagtgg

SEQ ID NO: 13341 - DNA, 19 bp, Artificial Sequence
  Target HLA Sequence complement
cccgcttcatcgcagtggg

SEQ ID NO: 13342 - DNA, 19 bp, Artificial Sequence
  Target HLA Sequence complement
ccgcttcatcgcagtgggc

SEQ ID NO: 13343 - DNA, 19 bp, Artificial Sequence
  Target HLA Sequence complement
cgcttcatcgcagtgggct

SEQ ID NO: 13344 - DNA, 19 bp, Artificial Sequence
  Target HLA Sequence complement
catcgcagtgggctacgtg

SEQ ID NO: 13345 - DNA, 19 bp, Artificial Sequence
  Target HLA Sequence complement
atcgcagtgggctacgtgg

SEQ ID NO: 13346 - DNA, 19 bp, Artificial Sequence
  Target HLA Sequence complement
tcgcagtgggctacgtgga

SEQ ID NO: 13347 - DNA, 19 bp, Artificial Sequence
  Target HLA Sequence complement
cgcagtgggctacgtggac

SEQ ID NO: 13348 - DNA, 19 bp, Artificial Sequence
  Target HLA Sequence complement
gcagtgggctacgtggacg

SEQ ID NO: 13349 - DNA, 19 bp, Artificial Sequence
  Target HLA Sequence complement
cagtgggctacgtggacga

SEQ ID NO: 13350 - DNA, 19 bp, Artificial Sequence
  Target HLA Sequence complement
agtgggctacgtggacgac

SEQ ID NO: 13351 - DNA, 19 bp, Artificial Sequence
  Target HLA Sequence complement
gtgggctacgtggacgaca

SEQ ID NO: 13352 - DNA, 19 bp, Artificial Sequence
  Target HLA Sequence complement
tgggctacgtggacgacac

SEQ ID NO: 13353 - DNA, 19 bp, Artificial Sequence
  Target HLA Sequence complement
gggctacgtggacgacacg

SEQ ID NO: 13354 - DNA, 19 bp, Artificial Sequence
  Target HLA Sequence complement
ggctacgtggacgacacgc

SEQ ID NO: 13355 - DNA, 19 bp, Artificial Sequence
  Target HLA Sequence complement
gctacgtggacgacacgca

SEQ ID NO: 13356 - DNA, 19 bp, Artificial Sequence
  Target HLA Sequence complement
ctacgtggacgacacgcag

SEQ ID NO: 13357 - DNA, 19 bp, Artificial Sequence
  Target HLA Sequence complement
cgtggacgacacgcagttc

SEQ ID NO: 13358 - DNA, 19 bp, Artificial Sequence
  Target HLA Sequence complement
gtggacgacacgcagttcg

SEQ ID NO: 13359 - DNA, 19 bp, Artificial Sequence
  Target HLA Sequence complement
ggacgacacgcagttcgtg

SEQ ID NO: 13360 - DNA, 19 bp, Artificial Sequence
  Target HLA Sequence complement
gacgacacgcagttcgtgc

SEQ ID NO: 13361 - DNA, 19 bp, Artificial Sequence
  Target HLA Sequence complement
acgacacgcagttcgtgcg

SEQ ID NO: 13362 - DNA, 19 bp, Artificial Sequence
  Target HLA Sequence complement
cgacacgcagttcgtgcgg

SEQ ID NO: 13363 - DNA, 19 bp, Artificial Sequence
  Target HLA Sequence complement
gacacgcagttcgtgcggt

SEQ ID NO: 13364 - DNA, 19 bp, Artificial Sequence
  Target HLA Sequence complement
cacgcagttcgtgcggttc

SEQ ID NO: 13365 - DNA, 19 bp, Artificial Sequence
  Target HLA Sequence complement
acgcagttcgtgcggttcg

SEQ ID NO: 13366 - DNA, 19 bp, Artificial Sequence
  Target HLA Sequence complement
cgcagttcgtgcggttcga

SEQ ID NO: 13367 - DNA, 19 bp, Artificial Sequence
  Target HLA Sequence complement
gcagttcgtgcggttcgac

SEQ ID NO: 13368 - DNA, 19 bp, Artificial Sequence
  Target HLA Sequence complement
gttcgtgcggttcgacagc

SEQ ID NO: 13369 - DNA, 19 bp, Artificial Sequence
  Target HLA Sequence complement
ttcgtgcggttcgacagcg

SEQ ID NO: 13370 - DNA, 19 bp, Artificial Sequence
  Target HLA Sequence complement
tcgtgcggttcgacagcga

SEQ ID NO: 13371 - DNA, 19 bp, Artificial Sequence
  Target HLA Sequence complement
cgtgcggttcgacagcgac

SEQ ID NO: 13372 - DNA, 19 bp, Artificial Sequence
  Target HLA Sequence complement
gtgcggttcgacagcgacg

SEQ ID NO: 13373 - DNA, 19 bp, Artificial Sequence
  Target HLA Sequence complement
tgcggttcgacagcgacgc

SEQ ID NO: 13374 - DNA, 19 bp, Artificial Sequence
  Target HLA Sequence complement
gcggttcgacagcgacgcc

SEQ ID NO: 13375 - DNA, 19 bp, Artificial Sequence
  Target HLA Sequence complement
cggttcgacagcgacgccg

SEQ ID NO: 13376 - DNA, 19 bp, Artificial Sequence
  Target HLA Sequence complement
ggttcgacagcgacgccgc

SEQ ID NO: 13377 - DNA, 19 bp, Artificial Sequence
  Target HLA Sequence complement
gttcgacagcgacgccgcg

SEQ ID NO: 13378 - DNA, 19 bp, Artificial Sequence
  Target HLA Sequence complement
ttcgacagcgacgccgcga

SEQ ID NO: 13379 - DNA, 19 bp, Artificial Sequence
  Target HLA Sequence complement
tcgacagcgacgccgcgag

SEQ ID NO: 13380 - DNA, 19 bp, Artificial Sequence
  Target HLA Sequence complement
cgacagcgacgccgcgagc

SEQ ID NO: 13381 - DNA, 19 bp, Artificial Sequence
  Target HLA Sequence complement
gacagcgacgccgcgagcc

SEQ ID NO: 13382 - DNA, 19 bp, Artificial Sequence
  Target HLA Sequence complement
acagcgacgccgcgagcca

SEQ ID NO: 13383 - DNA, 19 bp, Artificial Sequence
  Target HLA Sequence complement
cagcgacgccgcgagccag

SEQ ID NO: 13384 - DNA, 19 bp, Artificial Sequence
  Target HLA Sequence complement
agcgacgccgcgagccaga

SEQ ID NO: 13385 - DNA, 19 bp, Artificial Sequence
  Target HLA Sequence complement
gcgacgccgcgagccagag

SEQ ID NO: 13386 - DNA, 19 bp, Artificial Sequence
  Target HLA Sequence complement
cgacgccgcgagccagagg

SEQ ID NO: 13387 - DNA, 19 bp, Artificial Sequence
  Target HLA Sequence complement
gacgccgcgagccagagga

SEQ ID NO: 13388 - DNA, 19 bp, Artificial Sequence
  Target HLA Sequence complement
acgccgcgagccagaggat

SEQ ID NO: 13389 - DNA, 19 bp, Artificial Sequence
  Target HLA Sequence complement
cgccgcgagccagaggatg

SEQ ID NO: 13390 - DNA, 19 bp, Artificial Sequence
  Target HLA Sequence complement
gccgcgagccagaggatgg

SEQ ID NO: 13391 - DNA, 19 bp, Artificial Sequence
  Target HLA Sequence complement
ccgcgagccagaggatgga

SEQ ID NO: 13392 - DNA, 19 bp, Artificial Sequence
  Target HLA Sequence complement
cgcgagccagaggatggag

SEQ ID NO: 13393 - DNA, 19 bp, Artificial Sequence
  Target HLA Sequence complement
gcgagccagaggatggagc

SEQ ID NO: 13394 - DNA, 19 bp, Artificial Sequence
  Target HLA Sequence complement
cgagccagaggatggagcc

SEQ ID NO: 13395 - DNA, 19 bp, Artificial Sequence
  Target HLA Sequence complement
gagccagaggatggagccg

SEQ ID NO: 13396 - DNA, 19 bp, Artificial Sequence
  Target HLA Sequence complement
agccagaggatggagccgc

SEQ ID NO: 13397 - DNA, 19 bp, Artificial Sequence
  Target HLA Sequence complement
gccagaggatggagccgcg

SEQ ID NO: 13398 - DNA, 19 bp, Artificial Sequence
  Target HLA Sequence complement
ccagaggatggagccgcgg

SEQ ID NO: 13399 - DNA, 19 bp, Artificial Sequence
  Target HLA Sequence complement
cagaggatggagccgcggg

SEQ ID NO: 13400 - DNA, 19 bp, Artificial Sequence
  Target HLA Sequence complement
agaggatggagccgcgggc

SEQ ID NO: 13401 - DNA, 19 bp, Artificial Sequence
  Target HLA Sequence complement
gaggatggagccgcgggcg

SEQ ID NO: 13402 - DNA, 19 bp, Artificial Sequence
  Target HLA Sequence complement
aggatggagccgcgggcgc

SEQ ID NO: 13403 - DNA, 19 bp, Artificial Sequence
  Target HLA Sequence complement
ggatggagccgcgggcgcc

SEQ ID NO: 13404 - DNA, 19 bp, Artificial Sequence
  Target HLA Sequence complement
gatggagccgcgggcgccg

SEQ ID NO: 13405 - DNA, 19 bp, Artificial Sequence
  Target HLA Sequence complement
atggagccgcgggcgccgt

SEQ ID NO: 13406 - DNA, 19 bp, Artificial Sequence
  Target HLA Sequence complement
tggagccgcgggcgccgtg

SEQ ID NO: 13407 - DNA, 19 bp, Artificial Sequence
  Target HLA Sequence complement
ggagccgcgggcgccgtgg

SEQ ID NO: 13408 - DNA, 19 bp, Artificial Sequence
  Target HLA Sequence complement
gagccgcgggcgccgtgga

SEQ ID NO: 13409 - DNA, 19 bp, Artificial Sequence
  Target HLA Sequence complement
agccgcgggcgccgtggat

SEQ ID NO: 13410 - DNA, 19 bp, Artificial Sequence
  Target HLA Sequence complement
gccgcgggcgccgtggata

SEQ ID NO: 13411 - DNA, 19 bp, Artificial Sequence
  Target HLA Sequence complement
ccgcgggcgccgtggatag

SEQ ID NO: 13412 - DNA, 19 bp, Artificial Sequence
  Target HLA Sequence complement
cgcgggcgccgtggataga

SEQ ID NO: 13413 - DNA, 19 bp, Artificial Sequence
  Target HLA Sequence complement
gcgggcgccgtggatagag

SEQ ID NO: 13414 - DNA, 19 bp, Artificial Sequence
  Target HLA Sequence complement
cgggcgccgtggatagagc

SEQ ID NO: 13415 - DNA, 19 bp, Artificial Sequence
  Target HLA Sequence complement
gggcgccgtggatagagca

SEQ ID NO: 13416 - DNA, 19 bp, Artificial Sequence
  Target HLA Sequence complement
ggcgccgtggatagagcag

SEQ ID NO: 13417 - DNA, 19 bp, Artificial Sequence
  Target HLA Sequence complement
gcgccgtggatagagcagg

SEQ ID NO: 13418 - DNA, 19 bp, Artificial Sequence
  Target HLA Sequence complement
cgccgtggatagagcagga

SEQ ID NO: 13419 - DNA, 19 bp, Artificial Sequence
  Target HLA Sequence complement
gccgtggatagagcaggag

SEQ ID NO: 13420 - DNA, 19 bp, Artificial Sequence
  Target HLA Sequence complement
ccgtggatagagcaggagg

SEQ ID NO: 13421 - DNA, 19 bp, Artificial Sequence
  Target HLA Sequence complement
cgtggatagagcaggaggg

SEQ ID NO: 13422 - DNA, 19 bp, Artificial Sequence
  Target HLA Sequence complement
ggatagagcaggagggtcc

SEQ ID NO: 13423 - DNA, 19 bp, Artificial Sequence
  Target HLA Sequence complement
gatagagcaggagggtccg

SEQ ID NO: 13424 - DNA, 19 bp, Artificial Sequence
  Target HLA Sequence complement
atagagcaggagggtccgg

SEQ ID NO: 13425 - DNA, 19 bp, Artificial Sequence
  Target HLA Sequence complement
tagagcaggagggtccgga

SEQ ID NO: 13426 - DNA, 19 bp, Artificial Sequence
  Target HLA Sequence complement
agagcaggagggtccggag

SEQ ID NO: 13427 - DNA, 19 bp, Artificial Sequence
  Target HLA Sequence complement
gagcaggagggtccggagt

SEQ ID NO: 13428 - DNA, 19 bp, Artificial Sequence
  Target HLA Sequence complement
agcaggagggtccggagta

SEQ ID NO: 13429 - DNA, 19 bp, Artificial Sequence
  Target HLA Sequence complement
gcaggagggtccggagtat

SEQ ID NO: 13430 - DNA, 19 bp, Artificial Sequence
  Target HLA Sequence complement
ggagggtccggagtattgg

SEQ ID NO: 13431 - DNA, 19 bp, Artificial Sequence
  Target HLA Sequence complement
gagggtccggagtattggg

SEQ ID NO: 13432 - DNA, 19 bp, Artificial Sequence
  Target HLA Sequence complement
gggtccggagtattgggac

SEQ ID NO: 13433 - DNA, 19 bp, Artificial Sequence
  Target HLA Sequence complement
ggtccggagtattgggacg

SEQ ID NO: 13434 - DNA, 19 bp, Artificial Sequence
  Target HLA Sequence complement
gtccggagtattgggacgg

SEQ ID NO: 13435 - DNA, 19 bp, Artificial Sequence
  Target HLA Sequence complement
tccggagtattgggacggg

SEQ ID NO: 13436 - DNA, 19 bp, Artificial Sequence
  Target HLA Sequence complement
ccggagtattgggacgggg

SEQ ID NO: 13437 - DNA, 19 bp, Artificial Sequence
  Target HLA Sequence complement
cggagtattgggacgggga

SEQ ID NO: 13438 - DNA, 19 bp, Artificial Sequence
  Target HLA Sequence complement
ggagtattgggacggggag

SEQ ID NO: 13439 - DNA, 19 bp, Artificial Sequence
  Target HLA Sequence complement
attgggacggggagacacg

SEQ ID NO: 13440 - DNA, 19 bp, Artificial Sequence
  Target HLA Sequence complement
ttgggacggggagacacgg

SEQ ID NO: 13441 - DNA, 19 bp, Artificial Sequence
  Target HLA Sequence complement
tgggacggggagacacgga

SEQ ID NO: 13442 - DNA, 19 bp, Artificial Sequence
  Target HLA Sequence complement
gggacggggagacacggaa

SEQ ID NO: 13443 - DNA, 19 bp, Artificial Sequence
  Target HLA Sequence complement
ggacggggagacacggaaa

SEQ ID NO: 13444 - DNA, 19 bp, Artificial Sequence
  Target HLA Sequence complement
gacggggagacacggaaag

SEQ ID NO: 13445 - DNA, 19 bp, Artificial Sequence
  Target HLA Sequence complement
cggggagacacggaaagtg

SEQ ID NO: 13446 - DNA, 19 bp, Artificial Sequence
  Target HLA Sequence complement
ggcccactcacagactcac

SEQ ID NO: 13447 - DNA, 19 bp, Artificial Sequence
  Target HLA Sequence complement
gcccactcacagactcacc

SEQ ID NO: 13448 - DNA, 19 bp, Artificial Sequence
  Target HLA Sequence complement
cccactcacagactcaccg

SEQ ID NO: 13449 - DNA, 19 bp, Artificial Sequence
  Target HLA Sequence complement
cagactcaccgagtggacc

SEQ ID NO: 13450 - DNA, 19 bp, Artificial Sequence
  Target HLA Sequence complement
gactcaccgagtggacctg

SEQ ID NO: 13451 - DNA, 19 bp, Artificial Sequence
  Target HLA Sequence complement
actcaccgagtggacctgg

SEQ ID NO: 13452 - DNA, 19 bp, Artificial Sequence
  Target HLA Sequence complement
ctcaccgagtggacctggg

SEQ ID NO: 13453 - DNA, 19 bp, Artificial Sequence
  Target HLA Sequence complement
tcaccgagtggacctgggg

SEQ ID NO: 13454 - DNA, 19 bp, Artificial Sequence
  Target HLA Sequence complement
caccgagtggacctgggga

SEQ ID NO: 13455 - DNA, 19 bp, Artificial Sequence
  Target HLA Sequence complement
accgagtggacctggggac

SEQ ID NO: 13456 - DNA, 19 bp, Artificial Sequence
  Target HLA Sequence complement
ccgagtggacctggggacc

SEQ ID NO: 13457 - DNA, 19 bp, Artificial Sequence
  Target HLA Sequence complement
cgagtggacctggggaccc

SEQ ID NO: 13458 - DNA, 19 bp, Artificial Sequence
  Target HLA Sequence complement
gagtggacctggggaccct

SEQ ID NO: 13459 - DNA, 19 bp, Artificial Sequence
  Target HLA Sequence complement
agtggacctggggaccctg

SEQ ID NO: 13460 - DNA, 19 bp, Artificial Sequence
  Target HLA Sequence complement
gtggacctggggaccctgc

SEQ ID NO: 13461 - DNA, 19 bp, Artificial Sequence
  Target HLA Sequence complement
tggacctggggaccctgcg

SEQ ID NO: 13462 - DNA, 19 bp, Artificial Sequence
  Target HLA Sequence complement
ggacctggggaccctgcgc

SEQ ID NO: 13463 - DNA, 19 bp, Artificial Sequence
  Target HLA Sequence complement
gacctggggaccctgcgcg

SEQ ID NO: 13464 - DNA, 19 bp, Artificial Sequence
  Target HLA Sequence complement
acctggggaccctgcgcgg

SEQ ID NO: 13465 - DNA, 19 bp, Artificial Sequence
  Target HLA Sequence complement
cctggggaccctgcgcggc

SEQ ID NO: 13466 - DNA, 19 bp, Artificial Sequence
  Target HLA Sequence complement
ctggggaccctgcgcggct

SEQ ID NO: 13467 - DNA, 19 bp, Artificial Sequence
  Target HLA Sequence complement
tggggaccctgcgcggcta

SEQ ID NO: 13468 - DNA, 19 bp, Artificial Sequence
  Target HLA Sequence complement
ggggaccctgcgcggctac

SEQ ID NO: 13469 - DNA, 19 bp, Artificial Sequence
  Target HLA Sequence complement
gggaccctgcgcggctact

SEQ ID NO: 13470 - DNA, 19 bp, Artificial Sequence
  Target HLA Sequence complement
ggaccctgcgcggctacta

SEQ ID NO: 13471 - DNA, 19 bp, Artificial Sequence
  Target HLA Sequence complement
gaccctgcgcggctactac

SEQ ID NO: 13472 - DNA, 19 bp, Artificial Sequence
  Target HLA Sequence complement
accctgcgcggctactaca

SEQ ID NO: 13473 - DNA, 19 bp, Artificial Sequence
  Target HLA Sequence complement
ccctgcgcggctactacaa

SEQ ID NO: 13474 - DNA, 19 bp, Artificial Sequence
  Target HLA Sequence complement
cctgcgcggctactacaac

SEQ ID NO: 13475 - DNA, 19 bp, Artificial Sequence
  Target HLA Sequence complement
ctgcgcggctactacaacc

SEQ ID NO: 13476 - DNA, 19 bp, Artificial Sequence
  Target HLA Sequence complement
gcgcggctactacaaccag

SEQ ID NO: 13477 - DNA, 19 bp, Artificial Sequence
  Target HLA Sequence complement
ctacaaccagagcgaggcc

SEQ ID NO: 13478 - DNA, 19 bp, Artificial Sequence
  Target HLA Sequence complement
tacaaccagagcgaggccg

SEQ ID NO: 13479 - DNA, 19 bp, Artificial Sequence
  Target HLA Sequence complement
acaaccagagcgaggccgg

SEQ ID NO: 13480 - DNA, 19 bp, Artificial Sequence
  Target HLA Sequence complement
caaccagagcgaggccggt

SEQ ID NO: 13481 - DNA, 19 bp, Artificial Sequence
  Target HLA Sequence complement
aaccagagcgaggccggtt

SEQ ID NO: 13482 - DNA, 19 bp, Artificial Sequence
  Target HLA Sequence complement
accagagcgaggccggttc

SEQ ID NO: 13483 - DNA, 19 bp, Artificial Sequence
  Target HLA Sequence complement
ccagagcgaggccggttct

SEQ ID NO: 13484 - DNA, 19 bp, Artificial Sequence
  Target HLA Sequence complement
cagagcgaggccggttctc

SEQ ID NO: 13485 - DNA, 19 bp, Artificial Sequence
  Target HLA Sequence complement
agagcgaggccggttctca

SEQ ID NO: 13486 - DNA, 19 bp, Artificial Sequence
  Target HLA Sequence complement
gagcgaggccggttctcac

SEQ ID NO: 13487 - DNA, 19 bp, Artificial Sequence
  Target HLA Sequence complement
agcgaggccggttctcaca

SEQ ID NO: 13488 - DNA, 19 bp, Artificial Sequence
  Target HLA Sequence complement
gcgaggccggttctcacac

SEQ ID NO: 13489 - DNA, 19 bp, Artificial Sequence
  Target HLA Sequence complement
cgaggccggttctcacacc

SEQ ID NO: 13490 - DNA, 19 bp, Artificial Sequence
  Target HLA Sequence complement
gaggccggttctcacaccg

SEQ ID NO: 13491 - DNA, 19 bp, Artificial Sequence
  Target HLA Sequence complement
aggccggttctcacaccgt

SEQ ID NO: 13492 - DNA, 19 bp, Artificial Sequence
  Target HLA Sequence complement
ggccggttctcacaccgtc

SEQ ID NO: 13493 - DNA, 19 bp, Artificial Sequence
  Target HLA Sequence complement
gccggttctcacaccgtcc

SEQ ID NO: 13494 - DNA, 19 bp, Artificial Sequence
  Target HLA Sequence complement
ccggttctcacaccgtcca

SEQ ID NO: 13495 - DNA, 19 bp, Artificial Sequence
  Target HLA Sequence complement
cggttctcacaccgtccag

SEQ ID NO: 13496 - DNA, 19 bp, Artificial Sequence
  Target HLA Sequence complement
tgtatggctgcgacgtggg

SEQ ID NO: 13497 - DNA, 19 bp, Artificial Sequence
  Target HLA Sequence complement
gtatggctgcgacgtgggg

SEQ ID NO: 13498 - DNA, 19 bp, Artificial Sequence
  Target HLA Sequence complement
tatggctgcgacgtggggt

SEQ ID NO: 13499 - DNA, 19 bp, Artificial Sequence
  Target HLA Sequence complement
atggctgcgacgtggggtc

SEQ ID NO: 13500 - DNA, 19 bp, Artificial Sequence
  Target HLA Sequence complement
tggctgcgacgtggggtcg

SEQ ID NO: 13501 - DNA, 19 bp, Artificial Sequence
  Target HLA Sequence complement
ggctgcgacgtggggtcgg

SEQ ID NO: 13502 - DNA, 19 bp, Artificial Sequence
  Target HLA Sequence complement
gctgcgacgtggggtcgga

SEQ ID NO: 13503 - DNA, 19 bp, Artificial Sequence
  Target HLA Sequence complement
ctgcgacgtggggtcggac

SEQ ID NO: 13504 - DNA, 19 bp, Artificial Sequence
  Target HLA Sequence complement
tgcgacgtggggtcggact

SEQ ID NO: 13505 - DNA, 19 bp, Artificial Sequence
  Target HLA Sequence complement
gcgacgtggggtcggactg

SEQ ID NO: 13506 - DNA, 19 bp, Artificial Sequence
  Target HLA Sequence complement
cgacgtggggtcggactgg

SEQ ID NO: 13507 - DNA, 19 bp, Artificial Sequence
  Target HLA Sequence complement
gacgtggggtcggactggc

SEQ ID NO: 13508 - DNA, 19 bp, Artificial Sequence
  Target HLA Sequence complement
acgtggggtcggactggcg

SEQ ID NO: 13509 - DNA, 19 bp, Artificial Sequence
  Target HLA Sequence complement
cgtggggtcggactggcgc

SEQ ID NO: 13510 - DNA, 19 bp, Artificial Sequence
  Target HLA Sequence complement
gtggggtcggactggcgct

SEQ ID NO: 13511 - DNA, 19 bp, Artificial Sequence
  Target HLA Sequence complement
tggggtcggactggcgctt

SEQ ID NO: 13512 - DNA, 19 bp, Artificial Sequence
  Target HLA Sequence complement
ggggtcggactggcgcttc

SEQ ID NO: 13513 - DNA, 19 bp, Artificial Sequence
  Target HLA Sequence complement
gggtcggactggcgcttcc

SEQ ID NO: 13514 - DNA, 19 bp, Artificial Sequence
  Target HLA Sequence complement
ggtcggactggcgcttcct

SEQ ID NO: 13515 - DNA, 19 bp, Artificial Sequence
  Target HLA Sequence complement
gtcggactggcgcttcctc

SEQ ID NO: 13516 - DNA, 19 bp, Artificial Sequence
  Target HLA Sequence complement
tcggactggcgcttcctcc

SEQ ID NO: 13517 - DNA, 19 bp, Artificial Sequence
  Target HLA Sequence complement
cggactggcgcttcctccg

SEQ ID NO: 13518 - DNA, 19 bp, Artificial Sequence
  Target HLA Sequence complement
ggactggcgcttcctccgc

SEQ ID NO: 13519 - DNA, 19 bp, Artificial Sequence
  Target HLA Sequence complement
gactggcgcttcctccgcg

SEQ ID NO: 13520 - DNA, 19 bp, Artificial Sequence
  Target HLA Sequence complement
actggcgcttcctccgcgg

SEQ ID NO: 13521 - DNA, 19 bp, Artificial Sequence
  Target HLA Sequence complement
ctggcgcttcctccgcggg

SEQ ID NO: 13522 - DNA, 19 bp, Artificial Sequence
  Target HLA Sequence complement
tggcgcttcctccgcgggt

SEQ ID NO: 13523 - DNA, 19 bp, Artificial Sequence
  Target HLA Sequence complement
ggcgcttcctccgcgggta

SEQ ID NO: 13524 - DNA, 19 bp, Artificial Sequence
  Target HLA Sequence complement
gcgcttcctccgcgggtac

SEQ ID NO: 13525 - DNA, 19 bp, Artificial Sequence
  Target HLA Sequence complement
cgcttcctccgcgggtacc

SEQ ID NO: 13526 - DNA, 19 bp, Artificial Sequence
  Target HLA Sequence complement
gcttcctccgcgggtacca

SEQ ID NO: 13527 - DNA, 19 bp, Artificial Sequence
  Target HLA Sequence complement
cttcctccgcgggtaccac

SEQ ID NO: 13528 - DNA, 19 bp, Artificial Sequence
  Target HLA Sequence complement
ttcctccgcgggtaccacc

SEQ ID NO: 13529 - DNA, 19 bp, Artificial Sequence
  Target HLA Sequence complement
tcctccgcgggtaccacca

SEQ ID NO: 13530 - DNA, 19 bp, Artificial Sequence
  Target HLA Sequence complement
cctccgcgggtaccaccag

SEQ ID NO: 13531 - DNA, 19 bp, Artificial Sequence
  Target HLA Sequence complement
ctccgcgggtaccaccagt

SEQ ID NO: 13532 - DNA, 19 bp, Artificial Sequence
  Target HLA Sequence complement
tccgcgggtaccaccagta

SEQ ID NO: 13533 - DNA, 19 bp, Artificial Sequence
  Target HLA Sequence complement
ccgcgggtaccaccagtac

SEQ ID NO: 13534 - DNA, 19 bp, Artificial Sequence
  Target HLA Sequence complement
cgcgggtaccaccagtacg

SEQ ID NO: 13535 - DNA, 19 bp, Artificial Sequence
  Target HLA Sequence complement
gcgggtaccaccagtacgc

SEQ ID NO: 13536 - DNA, 19 bp, Artificial Sequence
  Target HLA Sequence complement
cgggtaccaccagtacgcc

SEQ ID NO: 13537 - DNA, 19 bp, Artificial Sequence
  Target HLA Sequence complement
gggtaccaccagtacgcct

SEQ ID NO: 13538 - DNA, 19 bp, Artificial Sequence
  Target HLA Sequence complement
ccaccagtacgcctacgac

SEQ ID NO: 13539 - DNA, 19 bp, Artificial Sequence
  Target HLA Sequence complement
caccagtacgcctacgacg

SEQ ID NO: 13540 - DNA, 19 bp, Artificial Sequence
  Target HLA Sequence complement
accagtacgcctacgacgg

SEQ ID NO: 13541 - DNA, 19 bp, Artificial Sequence
  Target HLA Sequence complement
ccagtacgcctacgacggc

SEQ ID NO: 13542 - DNA, 19 bp, Artificial Sequence
  Target HLA Sequence complement
cagtacgcctacgacggca

SEQ ID NO: 13543 - DNA, 19 bp, Artificial Sequence
  Target HLA Sequence complement
gtacgcctacgacggcaag

SEQ ID NO: 13544 - DNA, 19 bp, Artificial Sequence
  Target HLA Sequence complement
tacgcctacgacggcaagg

SEQ ID NO: 13545 - DNA, 19 bp, Artificial Sequence
  Target HLA Sequence complement
acgcctacgacggcaagga

SEQ ID NO: 13546 - DNA, 19 bp, Artificial Sequence
  Target HLA Sequence complement
cgcctacgacggcaaggat

SEQ ID NO: 13547 - DNA, 19 bp, Artificial Sequence
  Target HLA Sequence complement
cgccctgaaagaggacctg

SEQ ID NO: 13548 - DNA, 19 bp, Artificial Sequence
  Target HLA Sequence complement
gccctgaaagaggacctgc

SEQ ID NO: 13549 - DNA, 19 bp, Artificial Sequence
  Target HLA Sequence complement
ccctgaaagaggacctgcg

SEQ ID NO: 13550 - DNA, 19 bp, Artificial Sequence
  Target HLA Sequence complement
cctgaaagaggacctgcgc

SEQ ID NO: 13551 - DNA, 19 bp, Artificial Sequence
  Target HLA Sequence complement
aggacctgcgctcttggac

SEQ ID NO: 13552 - DNA, 19 bp, Artificial Sequence
  Target HLA Sequence complement
ggacctgcgctcttggacc

SEQ ID NO: 13553 - DNA, 19 bp, Artificial Sequence
  Target HLA Sequence complement
gacctgcgctcttggaccg

SEQ ID NO: 13554 - DNA, 19 bp, Artificial Sequence
  Target HLA Sequence complement
acctgcgctcttggaccgc

SEQ ID NO: 13555 - DNA, 19 bp, Artificial Sequence
  Target HLA Sequence complement
cctgcgctcttggaccgcg

SEQ ID NO: 13556 - DNA, 19 bp, Artificial Sequence
  Target HLA Sequence complement
ctgcgctcttggaccgcgg

SEQ ID NO: 13557 - DNA, 19 bp, Artificial Sequence
  Target HLA Sequence complement
tgcgctcttggaccgcggc

SEQ ID NO: 13558 - DNA, 19 bp, Artificial Sequence
  Target HLA Sequence complement
gcgctcttggaccgcggcg

SEQ ID NO: 13559 - DNA, 19 bp, Artificial Sequence
  Target HLA Sequence complement
cgctcttggaccgcggcgg

SEQ ID NO: 13560 - DNA, 19 bp, Artificial Sequence
  Target HLA Sequence complement
gctcttggaccgcggcgga

SEQ ID NO: 13561 - DNA, 19 bp, Artificial Sequence
  Target HLA Sequence complement
ctcttggaccgcggcggac

SEQ ID NO: 13562 - DNA, 19 bp, Artificial Sequence
  Target HLA Sequence complement
tcttggaccgcggcggaca

SEQ ID NO: 13563 - DNA, 19 bp, Artificial Sequence
  Target HLA Sequence complement
cttggaccgcggcggacat

SEQ ID NO: 13564 - DNA, 19 bp, Artificial Sequence
  Target HLA Sequence complement
ttggaccgcggcggacatg

SEQ ID NO: 13565 - DNA, 19 bp, Artificial Sequence
  Target HLA Sequence complement
tggaccgcggcggacatgg

SEQ ID NO: 13566 - DNA, 19 bp, Artificial Sequence
  Target HLA Sequence complement
ggaccgcggcggacatggc

SEQ ID NO: 13567 - DNA, 19 bp, Artificial Sequence
  Target HLA Sequence complement
gaccgcggcggacatggca

SEQ ID NO: 13568 - DNA, 19 bp, Artificial Sequence
  Target HLA Sequence complement
accgcggcggacatggcag

SEQ ID NO: 13569 - DNA, 19 bp, Artificial Sequence
  Target HLA Sequence complement
ccgcggcggacatggcagc

SEQ ID NO: 13570 - DNA, 19 bp, Artificial Sequence
  Target HLA Sequence complement
cgcggcggacatggcagct

SEQ ID NO: 13571 - DNA, 19 bp, Artificial Sequence
  Target HLA Sequence complement
gcggcggacatggcagctc

SEQ ID NO: 13572 - DNA, 19 bp, Artificial Sequence
  Target HLA Sequence complement
cggcggacatggcagctca

SEQ ID NO: 13573 - DNA, 19 bp, Artificial Sequence
  Target HLA Sequence complement
ggcggacatggcagctcag

SEQ ID NO: 13574 - DNA, 19 bp, Artificial Sequence
  Target HLA Sequence complement
gcggacatggcagctcaga

SEQ ID NO: 13575 - DNA, 19 bp, Artificial Sequence
  Target HLA Sequence complement
cggacatggcagctcagac

SEQ ID NO: 13576 - DNA, 19 bp, Artificial Sequence
  Target HLA Sequence complement
ggacatggcagctcagacc

SEQ ID NO: 13577 - DNA, 19 bp, Artificial Sequence
  Target HLA Sequence complement
catggcagctcagaccacc

SEQ ID NO: 13578 - DNA, 19 bp, Artificial Sequence
  Target HLA Sequence complement
ggcagctcagaccaccaag

SEQ ID NO: 13579 - DNA, 19 bp, Artificial Sequence
  Target HLA Sequence complement
gcagctcagaccaccaagc

SEQ ID NO: 13580 - DNA, 19 bp, Artificial Sequence
  Target HLA Sequence complement
ccaagcacaagtgggaggc

SEQ ID NO: 13581 - DNA, 19 bp, Artificial Sequence
  Target HLA Sequence complement
caagcacaagtgggaggcg

SEQ ID NO: 13582 - DNA, 19 bp, Artificial Sequence
  Target HLA Sequence complement
aagcacaagtgggaggcgg

SEQ ID NO: 13583 - DNA, 19 bp, Artificial Sequence
  Target HLA Sequence complement
agcacaagtgggaggcggc

SEQ ID NO: 13584 - DNA, 19 bp, Artificial Sequence
  Target HLA Sequence complement
gcacaagtgggaggcggcc

SEQ ID NO: 13585 - DNA, 19 bp, Artificial Sequence
  Target HLA Sequence complement
cacaagtgggaggcggccc

SEQ ID NO: 13586 - DNA, 19 bp, Artificial Sequence
  Target HLA Sequence complement
acaagtgggaggcggccca

SEQ ID NO: 13587 - DNA, 19 bp, Artificial Sequence
  Target HLA Sequence complement
caagtgggaggcggcccat

SEQ ID NO: 13588 - DNA, 19 bp, Artificial Sequence
  Target HLA Sequence complement
aagtgggaggcggcccatg

SEQ ID NO: 13589 - DNA, 19 bp, Artificial Sequence
  Target HLA Sequence complement
agtgggaggcggcccatgt

SEQ ID NO: 13590 - DNA, 19 bp, Artificial Sequence
  Target HLA Sequence complement
gtgggaggcggcccatgtg

SEQ ID NO: 13591 - DNA, 19 bp, Artificial Sequence
  Target HLA Sequence complement
tgggaggcggcccatgtgg

SEQ ID NO: 13592 - DNA, 19 bp, Artificial Sequence
  Target HLA Sequence complement
gggaggcggcccatgtggc

SEQ ID NO: 13593 - DNA, 19 bp, Artificial Sequence
  Target HLA Sequence complement
ggaggcggcccatgtggcg

SEQ ID NO: 13594 - DNA, 19 bp, Artificial Sequence
  Target HLA Sequence complement
gaggcggcccatgtggcgg

SEQ ID NO: 13595 - DNA, 19 bp, Artificial Sequence
  Target HLA Sequence complement
aggcggcccatgtggcgga

SEQ ID NO: 13596 - DNA, 19 bp, Artificial Sequence
  Target HLA Sequence complement
ggcggcccatgtggcggag

SEQ ID NO: 13597 - DNA, 19 bp, Artificial Sequence
  Target HLA Sequence complement
gcggcccatgtggcggagc

SEQ ID NO: 13598 - DNA, 19 bp, Artificial Sequence
  Target HLA Sequence complement
cggcccatgtggcggagca

SEQ ID NO: 13599 - DNA, 19 bp, Artificial Sequence
  Target HLA Sequence complement
ggcccatgtggcggagcag

SEQ ID NO: 13600 - DNA, 19 bp, Artificial Sequence
  Target HLA Sequence complement
gcccatgtggcggagcagt

SEQ ID NO: 13601 - DNA, 19 bp, Artificial Sequence
  Target HLA Sequence complement
cccatgtggcggagcagtt

SEQ ID NO: 13602 - DNA, 19 bp, Artificial Sequence
  Target HLA Sequence complement
ccatgtggcggagcagttg

SEQ ID NO: 13603 - DNA, 19 bp, Artificial Sequence
  Target HLA Sequence complement
gtggcggagcagttgagag

SEQ ID NO: 13604 - DNA, 19 bp, Artificial Sequence
  Target HLA Sequence complement
tggcggagcagttgagagc

SEQ ID NO: 13605 - DNA, 19 bp, Artificial Sequence
  Target HLA Sequence complement
ggcggagcagttgagagcc

SEQ ID NO: 13606 - DNA, 19 bp, Artificial Sequence
  Target HLA Sequence complement
gcggagcagttgagagcct

SEQ ID NO: 13607 - DNA, 19 bp, Artificial Sequence
  Target HLA Sequence complement
tgagagcctacctggaggg

SEQ ID NO: 13608 - DNA, 19 bp, Artificial Sequence
  Target HLA Sequence complement
gagagcctacctggagggc

SEQ ID NO: 13609 - DNA, 19 bp, Artificial Sequence
  Target HLA Sequence complement
agagcctacctggagggca

SEQ ID NO: 13610 - DNA, 19 bp, Artificial Sequence
  Target HLA Sequence complement
gagcctacctggagggcac

SEQ ID NO: 13611 - DNA, 19 bp, Artificial Sequence
  Target HLA Sequence complement
agcctacctggagggcacg

SEQ ID NO: 13612 - DNA, 19 bp, Artificial Sequence
  Target HLA Sequence complement
gcctacctggagggcacgt

SEQ ID NO: 13613 - DNA, 19 bp, Artificial Sequence
  Target HLA Sequence complement
cctacctggagggcacgtg

SEQ ID NO: 13614 - DNA, 19 bp, Artificial Sequence
  Target HLA Sequence complement
ctacctggagggcacgtgc

SEQ ID NO: 13615 - DNA, 19 bp, Artificial Sequence
  Target HLA Sequence complement
tacctggagggcacgtgcg

SEQ ID NO: 13616 - DNA, 19 bp, Artificial Sequence
  Target HLA Sequence complement
acctggagggcacgtgcgt

SEQ ID NO: 13617 - DNA, 19 bp, Artificial Sequence
  Target HLA Sequence complement
cctggagggcacgtgcgtg

SEQ ID NO: 13618 - DNA, 19 bp, Artificial Sequence
  Target HLA Sequence complement
ctggagggcacgtgcgtgg

SEQ ID NO: 13619 - DNA, 19 bp, Artificial Sequence
  Target HLA Sequence complement
tggagggcacgtgcgtgga

SEQ ID NO: 13620 - DNA, 19 bp, Artificial Sequence
  Target HLA Sequence complement
ggagggcacgtgcgtggag

SEQ ID NO: 13621 - DNA, 19 bp, Artificial Sequence
  Target HLA Sequence complement
gagggcacgtgcgtggagt

SEQ ID NO: 13622 - DNA, 19 bp, Artificial Sequence
  Target HLA Sequence complement
agggcacgtgcgtggagtg

SEQ ID NO: 13623 - DNA, 19 bp, Artificial Sequence
  Target HLA Sequence complement
gggcacgtgcgtggagtgg

SEQ ID NO: 13624 - DNA, 19 bp, Artificial Sequence
  Target HLA Sequence complement
ggcacgtgcgtggagtggc

SEQ ID NO: 13625 - DNA, 19 bp, Artificial Sequence
  Target HLA Sequence complement
gcacgtgcgtggagtggct

SEQ ID NO: 13626 - DNA, 19 bp, Artificial Sequence
  Target HLA Sequence complement
cacgtgcgtggagtggctc

SEQ ID NO: 13627 - DNA, 19 bp, Artificial Sequence
  Target HLA Sequence complement
acgtgcgtggagtggctcc

SEQ ID NO: 13628 - DNA, 19 bp, Artificial Sequence
  Target HLA Sequence complement
cgtgcgtggagtggctccg

SEQ ID NO: 13629 - DNA, 19 bp, Artificial Sequence
  Target HLA Sequence complement
gtgcgtggagtggctccgc

SEQ ID NO: 13630 - DNA, 19 bp, Artificial Sequence
  Target HLA Sequence complement
tgcgtggagtggctccgca

SEQ ID NO: 13631 - DNA, 19 bp, Artificial Sequence
  Target HLA Sequence complement
gcgtggagtggctccgcag

SEQ ID NO: 13632 - DNA, 19 bp, Artificial Sequence
  Target HLA Sequence complement
cgtggagtggctccgcaga

SEQ ID NO: 13633 - DNA, 19 bp, Artificial Sequence
  Target HLA Sequence complement
gtggagtggctccgcagat

SEQ ID NO: 13634 - DNA, 19 bp, Artificial Sequence
  Target HLA Sequence complement
ggagtggctccgcagatac

SEQ ID NO: 13635 - DNA, 19 bp, Artificial Sequence
  Target HLA Sequence complement
gagtggctccgcagatacc

SEQ ID NO: 13636 - DNA, 19 bp, Artificial Sequence
  Target HLA Sequence complement
tggctccgcagatacctgg

SEQ ID NO: 13637 - DNA, 19 bp, Artificial Sequence
  Target HLA Sequence complement
ggctccgcagatacctgga

SEQ ID NO: 13638 - DNA, 19 bp, Artificial Sequence
  Target HLA Sequence complement
gctccgcagatacctggag

SEQ ID NO: 13639 - DNA, 19 bp, Artificial Sequence
  Target HLA Sequence complement
cctggagaacgggaaggag

SEQ ID NO: 13640 - DNA, 19 bp, Artificial Sequence
  Target HLA Sequence complement
ggagaacgggaaggagacg

SEQ ID NO: 13641 - DNA, 19 bp, Artificial Sequence
  Target HLA Sequence complement
gagaacgggaaggagacgc

SEQ ID NO: 13642 - DNA, 19 bp, Artificial Sequence
  Target HLA Sequence complement
gaacgggaaggagacgctg

SEQ ID NO: 13643 - DNA, 19 bp, Artificial Sequence
  Target HLA Sequence complement
aacgggaaggagacgctgc

SEQ ID NO: 13644 - DNA, 19 bp, Artificial Sequence
  Target HLA Sequence complement
acgggaaggagacgctgca

SEQ ID NO: 13645 - DNA, 19 bp, Artificial Sequence
  Target HLA Sequence complement
cgggaaggagacgctgcag

SEQ ID NO: 13646 - DNA, 19 bp, Artificial Sequence
  Target HLA Sequence complement
gggaaggagacgctgcagc

SEQ ID NO: 13647 - DNA, 19 bp, Artificial Sequence
  Target HLA Sequence complement
ggaaggagacgctgcagcg

SEQ ID NO: 13648 - DNA, 19 bp, Artificial Sequence
  Target HLA Sequence complement
gaaggagacgctgcagcgc

SEQ ID NO: 13649 - DNA, 19 bp, Artificial Sequence
  Target HLA Sequence complement
aaggagacgctgcagcgca

SEQ ID NO: 13650 - DNA, 19 bp, Artificial Sequence
  Target HLA Sequence complement
aggagacgctgcagcgcac

SEQ ID NO: 13651 - DNA, 19 bp, Artificial Sequence
  Target HLA Sequence complement
ggagacgctgcagcgcacg

SEQ ID NO: 13652 - DNA, 19 bp, Artificial Sequence
  Target HLA Sequence complement
gagacgctgcagcgcacgg

SEQ ID NO: 13653 - DNA, 19 bp, Artificial Sequence
  Target HLA Sequence complement
agacgctgcagcgcacgga

SEQ ID NO: 13654 - DNA, 19 bp, Artificial Sequence
  Target HLA Sequence complement
gacgctgcagcgcacggac

SEQ ID NO: 13655 - DNA, 19 bp, Artificial Sequence
  Target HLA Sequence complement
acgctgcagcgcacggacg

SEQ ID NO: 13656 - DNA, 19 bp, Artificial Sequence
  Target HLA Sequence complement
cgctgcagcgcacggacgc

SEQ ID NO: 13657 - DNA, 19 bp, Artificial Sequence
  Target HLA Sequence complement
gctgcagcgcacggacgcc

SEQ ID NO: 13658 - DNA, 19 bp, Artificial Sequence
  Target HLA Sequence complement
ctgcagcgcacggacgccc

SEQ ID NO: 13659 - DNA, 19 bp, Artificial Sequence
  Target HLA Sequence complement
tgcagcgcacggacgcccc

SEQ ID NO: 13660 - DNA, 19 bp, Artificial Sequence
  Target HLA Sequence complement
gcagcgcacggacgccccc

SEQ ID NO: 13661 - DNA, 19 bp, Artificial Sequence
  Target HLA Sequence complement
cagcgcacggacgccccca

SEQ ID NO: 13662 - DNA, 19 bp, Artificial Sequence
  Target HLA Sequence complement
agcgcacggacgcccccaa

SEQ ID NO: 13663 - DNA, 19 bp, Artificial Sequence
  Target HLA Sequence complement
gcgcacggacgcccccaaa

SEQ ID NO: 13664 - DNA, 19 bp, Artificial Sequence
  Target HLA Sequence complement
cgcacggacgcccccaaaa

SEQ ID NO: 13665 - DNA, 19 bp, Artificial Sequence
  Target HLA Sequence complement
gcacggacgcccccaaaac

SEQ ID NO: 13666 - DNA, 19 bp, Artificial Sequence
  Target HLA Sequence complement
cacggacgcccccaaaacg

SEQ ID NO: 13667 - DNA, 19 bp, Artificial Sequence
  Target HLA Sequence complement
acggacgcccccaaaacgc

SEQ ID NO: 13668 - DNA, 19 bp, Artificial Sequence
  Target HLA Sequence complement
cggacgcccccaaaacgca

SEQ ID NO: 13669 - DNA, 19 bp, Artificial Sequence
  Target HLA Sequence complement
ggacgcccccaaaacgcat

SEQ ID NO: 13670 - DNA, 19 bp, Artificial Sequence
  Target HLA Sequence complement
caccacgctgtctctgacc

SEQ ID NO: 13671 - DNA, 19 bp, Artificial Sequence
  Target HLA Sequence complement
ccatgaagccaccctgagg

SEQ ID NO: 13672 - DNA, 19 bp, Artificial Sequence
  Target HLA Sequence complement
tgaagccaccctgaggtgc

SEQ ID NO: 13673 - DNA, 19 bp, Artificial Sequence
  Target HLA Sequence complement
gaagccaccctgaggtgct

SEQ ID NO: 13674 - DNA, 19 bp, Artificial Sequence
  Target HLA Sequence complement
aagccaccctgaggtgctg

SEQ ID NO: 13675 - DNA, 19 bp, Artificial Sequence
  Target HLA Sequence complement
agccaccctgaggtgctgg

SEQ ID NO: 13676 - DNA, 19 bp, Artificial Sequence
  Target HLA Sequence complement
gccaccctgaggtgctggg

SEQ ID NO: 13677 - DNA, 19 bp, Artificial Sequence
  Target HLA Sequence complement
ccaccctgaggtgctgggc

SEQ ID NO: 13678 - DNA, 19 bp, Artificial Sequence
  Target HLA Sequence complement
caccctgaggtgctgggcc

SEQ ID NO: 13679 - DNA, 19 bp, Artificial Sequence
  Target HLA Sequence complement
accctgaggtgctgggccc

SEQ ID NO: 13680 - DNA, 19 bp, Artificial Sequence
  Target HLA Sequence complement
ccctgaggtgctgggccct

SEQ ID NO: 13681 - DNA, 19 bp, Artificial Sequence
  Target HLA Sequence complement
cctgaggtgctgggccctg

SEQ ID NO: 13682 - DNA, 19 bp, Artificial Sequence
  Target HLA Sequence complement
ctgaggtgctgggccctga

SEQ ID NO: 13683 - DNA, 19 bp, Artificial Sequence
  Target HLA Sequence complement
tgaggtgctgggccctgag

SEQ ID NO: 13684 - DNA, 19 bp, Artificial Sequence
  Target HLA Sequence complement
gaggtgctgggccctgagc

SEQ ID NO: 13685 - DNA, 19 bp, Artificial Sequence
  Target HLA Sequence complement
aggtgctgggccctgagct

SEQ ID NO: 13686 - DNA, 19 bp, Artificial Sequence
  Target HLA Sequence complement
ggtgctgggccctgagctt

SEQ ID NO: 13687 - DNA, 19 bp, Artificial Sequence
  Target HLA Sequence complement
gtgctgggccctgagcttc

SEQ ID NO: 13688 - DNA, 19 bp, Artificial Sequence
  Target HLA Sequence complement
tgctgggccctgagcttct

SEQ ID NO: 13689 - DNA, 19 bp, Artificial Sequence
  Target HLA Sequence complement
gctgggccctgagcttcta

SEQ ID NO: 13690 - DNA, 19 bp, Artificial Sequence
  Target HLA Sequence complement
ctgggccctgagcttctac

SEQ ID NO: 13691 - DNA, 19 bp, Artificial Sequence
  Target HLA Sequence complement
tgggccctgagcttctacc

SEQ ID NO: 13692 - DNA, 19 bp, Artificial Sequence
  Target HLA Sequence complement
gggccctgagcttctaccc

SEQ ID NO: 13693 - DNA, 19 bp, Artificial Sequence
  Target HLA Sequence complement
ggccctgagcttctaccct

SEQ ID NO: 13694 - DNA, 19 bp, Artificial Sequence
  Target HLA Sequence complement
gccctgagcttctaccctg

SEQ ID NO: 13695 - DNA, 19 bp, Artificial Sequence
  Target HLA Sequence complement
ccctgagcttctaccctgc

SEQ ID NO: 13696 - DNA, 19 bp, Artificial Sequence
  Target HLA Sequence complement
cctgagcttctaccctgcg

SEQ ID NO: 13697 - DNA, 19 bp, Artificial Sequence
  Target HLA Sequence complement
ctgagcttctaccctgcgg

SEQ ID NO: 13698 - DNA, 19 bp, Artificial Sequence
  Target HLA Sequence complement
gagcttctaccctgcggag

SEQ ID NO: 13699 - DNA, 19 bp, Artificial Sequence
  Target HLA Sequence complement
ccctgcggagatcacactg

SEQ ID NO: 13700 - DNA, 19 bp, Artificial Sequence
  Target HLA Sequence complement
tcacactgacctggcagcg

SEQ ID NO: 13701 - DNA, 19 bp, Artificial Sequence
  Target HLA Sequence complement
cacactgacctggcagcgg

SEQ ID NO: 13702 - DNA, 19 bp, Artificial Sequence
  Target HLA Sequence complement
acactgacctggcagcggg

SEQ ID NO: 13703 - DNA, 19 bp, Artificial Sequence
  Target HLA Sequence complement
cactgacctggcagcggga

SEQ ID NO: 13704 - DNA, 19 bp, Artificial Sequence
  Target HLA Sequence complement
actgacctggcagcgggat

SEQ ID NO: 13705 - DNA, 19 bp, Artificial Sequence
  Target HLA Sequence complement
ctgacctggcagcgggatg

SEQ ID NO: 13706 - DNA, 19 bp, Artificial Sequence
  Target HLA Sequence complement
tgacctggcagcgggatgg

SEQ ID NO: 13707 - DNA, 19 bp, Artificial Sequence
  Target HLA Sequence complement
gacctggcagcgggatggg

SEQ ID NO: 13708 - DNA, 19 bp, Artificial Sequence
  Target HLA Sequence complement
acctggcagcgggatgggg

SEQ ID NO: 13709 - DNA, 19 bp, Artificial Sequence
  Target HLA Sequence complement
cctggcagcgggatgggga

SEQ ID NO: 13710 - DNA, 19 bp, Artificial Sequence
  Target HLA Sequence complement
ctggcagcgggatggggag

SEQ ID NO: 13711 - DNA, 19 bp, Artificial Sequence
  Target HLA Sequence complement
tggcagcgggatggggagg

SEQ ID NO: 13712 - DNA, 19 bp, Artificial Sequence
  Target HLA Sequence complement
ggcagcgggatggggagga

SEQ ID NO: 13713 - DNA, 19 bp, Artificial Sequence
  Target HLA Sequence complement
gcagcgggatggggaggac

SEQ ID NO: 13714 - DNA, 19 bp, Artificial Sequence
  Target HLA Sequence complement
cagcgggatggggaggacc

SEQ ID NO: 13715 - DNA, 19 bp, Artificial Sequence
  Target HLA Sequence complement
agcgggatggggaggacca

SEQ ID NO: 13716 - DNA, 19 bp, Artificial Sequence
  Target HLA Sequence complement
gcgggatggggaggaccag

SEQ ID NO: 13717 - DNA, 19 bp, Artificial Sequence
  Target HLA Sequence complement
cgggatggggaggaccaga

SEQ ID NO: 13718 - DNA, 19 bp, Artificial Sequence
  Target HLA Sequence complement
gggatggggaggaccagac

SEQ ID NO: 13719 - DNA, 19 bp, Artificial Sequence
  Target HLA Sequence complement
ggatggggaggaccagacc

SEQ ID NO: 13720 - DNA, 19 bp, Artificial Sequence
  Target HLA Sequence complement
gatggggaggaccagaccc

SEQ ID NO: 13721 - DNA, 19 bp, Artificial Sequence
  Target HLA Sequence complement
atggggaggaccagaccca

SEQ ID NO: 13722 - DNA, 19 bp, Artificial Sequence
  Target HLA Sequence complement
tggggaggaccagacccag

SEQ ID NO: 13723 - DNA, 19 bp, Artificial Sequence
  Target HLA Sequence complement
ggggaggaccagacccagg

SEQ ID NO: 13724 - DNA, 19 bp, Artificial Sequence
  Target HLA Sequence complement
gggaggaccagacccagga

SEQ ID NO: 13725 - DNA, 19 bp, Artificial Sequence
  Target HLA Sequence complement
ggaggaccagacccaggac

SEQ ID NO: 13726 - DNA, 19 bp, Artificial Sequence
  Target HLA Sequence complement
gaggaccagacccaggaca

SEQ ID NO: 13727 - DNA, 19 bp, Artificial Sequence
  Target HLA Sequence complement
aggaccagacccaggacac

SEQ ID NO: 13728 - DNA, 19 bp, Artificial Sequence
  Target HLA Sequence complement
ggaccagacccaggacacg

SEQ ID NO: 13729 - DNA, 19 bp, Artificial Sequence
  Target HLA Sequence complement
gaccagacccaggacacgg

SEQ ID NO: 13730 - DNA, 19 bp, Artificial Sequence
  Target HLA Sequence complement
accagacccaggacacgga

SEQ ID NO: 13731 - DNA, 19 bp, Artificial Sequence
  Target HLA Sequence complement
ccagacccaggacacggag

SEQ ID NO: 13732 - DNA, 19 bp, Artificial Sequence
  Target HLA Sequence complement
cagacccaggacacggagc

SEQ ID NO: 13733 - DNA, 19 bp, Artificial Sequence
  Target HLA Sequence complement
agacccaggacacggagct

SEQ ID NO: 13734 - DNA, 19 bp, Artificial Sequence
  Target HLA Sequence complement
gacccaggacacggagctc

SEQ ID NO: 13735 - DNA, 19 bp, Artificial Sequence
  Target HLA Sequence complement
acccaggacacggagctcg

SEQ ID NO: 13736 - DNA, 19 bp, Artificial Sequence
  Target HLA Sequence complement
cccaggacacggagctcgt

SEQ ID NO: 13737 - DNA, 19 bp, Artificial Sequence
  Target HLA Sequence complement
ccaggacacggagctcgtg

SEQ ID NO: 13738 - DNA, 19 bp, Artificial Sequence
  Target HLA Sequence complement
caggacacggagctcgtgg

SEQ ID NO: 13739 - DNA, 19 bp, Artificial Sequence
  Target HLA Sequence complement
aggacacggagctcgtgga

SEQ ID NO: 13740 - DNA, 19 bp, Artificial Sequence
  Target HLA Sequence complement
ggacacggagctcgtggag

SEQ ID NO: 13741 - DNA, 19 bp, Artificial Sequence
  Target HLA Sequence complement
gacacggagctcgtggaga

SEQ ID NO: 13742 - DNA, 19 bp, Artificial Sequence
  Target HLA Sequence complement
acacggagctcgtggagac

SEQ ID NO: 13743 - DNA, 19 bp, Artificial Sequence
  Target HLA Sequence complement
cacggagctcgtggagacc

SEQ ID NO: 13744 - DNA, 19 bp, Artificial Sequence
  Target HLA Sequence complement
acggagctcgtggagacca

SEQ ID NO: 13745 - DNA, 19 bp, Artificial Sequence
  Target HLA Sequence complement
cggagctcgtggagaccag

SEQ ID NO: 13746 - DNA, 19 bp, Artificial Sequence
  Target HLA Sequence complement
ggagctcgtggagaccagg

SEQ ID NO: 13747 - DNA, 19 bp, Artificial Sequence
  Target HLA Sequence complement
gagctcgtggagaccaggc

SEQ ID NO: 13748 - DNA, 19 bp, Artificial Sequence
  Target HLA Sequence complement
agctcgtggagaccaggcc

SEQ ID NO: 13749 - DNA, 19 bp, Artificial Sequence
  Target HLA Sequence complement
gctcgtggagaccaggcct

SEQ ID NO: 13750 - DNA, 19 bp, Artificial Sequence
  Target HLA Sequence complement
ctcgtggagaccaggcctg

SEQ ID NO: 13751 - DNA, 19 bp, Artificial Sequence
  Target HLA Sequence complement
tcgtggagaccaggcctgc

SEQ ID NO: 13752 - DNA, 19 bp, Artificial Sequence
  Target HLA Sequence complement
cgtggagaccaggcctgca

SEQ ID NO: 13753 - DNA, 19 bp, Artificial Sequence
  Target HLA Sequence complement
gtggagaccaggcctgcag

SEQ ID NO: 13754 - DNA, 19 bp, Artificial Sequence
  Target HLA Sequence complement
tggagaccaggcctgcagg

SEQ ID NO: 13755 - DNA, 19 bp, Artificial Sequence
  Target HLA Sequence complement
ggagaccaggcctgcaggg

SEQ ID NO: 13756 - DNA, 19 bp, Artificial Sequence
  Target HLA Sequence complement
gagaccaggcctgcagggg

SEQ ID NO: 13757 - DNA, 19 bp, Artificial Sequence
  Target HLA Sequence complement
agaccaggcctgcagggga

SEQ ID NO: 13758 - DNA, 19 bp, Artificial Sequence
  Target HLA Sequence complement
gaccaggcctgcaggggat

SEQ ID NO: 13759 - DNA, 19 bp, Artificial Sequence
  Target HLA Sequence complement
accaggcctgcaggggatg

SEQ ID NO: 13760 - DNA, 19 bp, Artificial Sequence
  Target HLA Sequence complement
ccaggcctgcaggggatgg

SEQ ID NO: 13761 - DNA, 19 bp, Artificial Sequence
  Target HLA Sequence complement
caggcctgcaggggatgga

SEQ ID NO: 13762 - DNA, 19 bp, Artificial Sequence
  Target HLA Sequence complement
aggcctgcaggggatggaa

SEQ ID NO: 13763 - DNA, 19 bp, Artificial Sequence
  Target HLA Sequence complement
ggcctgcaggggatggaac

SEQ ID NO: 13764 - DNA, 19 bp, Artificial Sequence
  Target HLA Sequence complement
gcctgcaggggatggaacc

SEQ ID NO: 13765 - DNA, 19 bp, Artificial Sequence
  Target HLA Sequence complement
cctgcaggggatggaacct

SEQ ID NO: 13766 - DNA, 19 bp, Artificial Sequence
  Target HLA Sequence complement
gcaggggatggaaccttcc

SEQ ID NO: 13767 - DNA, 19 bp, Artificial Sequence
  Target HLA Sequence complement
accttccagaagtgggcgg

SEQ ID NO: 13768 - DNA, 19 bp, Artificial Sequence
  Target HLA Sequence complement
ccttccagaagtgggcggc

SEQ ID NO: 13769 - DNA, 19 bp, Artificial Sequence
  Target HLA Sequence complement
cttccagaagtgggcggct

SEQ ID NO: 13770 - DNA, 19 bp, Artificial Sequence
  Target HLA Sequence complement
ttccagaagtgggcggctg

SEQ ID NO: 13771 - DNA, 19 bp, Artificial Sequence
  Target HLA Sequence complement
tccagaagtgggcggctgt

SEQ ID NO: 13772 - DNA, 19 bp, Artificial Sequence
  Target HLA Sequence complement
ccagaagtgggcggctgtg

SEQ ID NO: 13773 - DNA, 19 bp, Artificial Sequence
  Target HLA Sequence complement
cagaagtgggcggctgtgg

SEQ ID NO: 13774 - DNA, 19 bp, Artificial Sequence
  Target HLA Sequence complement
agaagtgggcggctgtggt

SEQ ID NO: 13775 - DNA, 19 bp, Artificial Sequence
  Target HLA Sequence complement
gaagtgggcggctgtggtg

SEQ ID NO: 13776 - DNA, 19 bp, Artificial Sequence
  Target HLA Sequence complement
aagtgggcggctgtggtgg

SEQ ID NO: 13777 - DNA, 19 bp, Artificial Sequence
  Target HLA Sequence complement
agtgggcggctgtggtggt

SEQ ID NO: 13778 - DNA, 19 bp, Artificial Sequence
  Target HLA Sequence complement
gtgggcggctgtggtggtg

SEQ ID NO: 13779 - DNA, 19 bp, Artificial Sequence
  Target HLA Sequence complement
tgggcggctgtggtggtgc

SEQ ID NO: 13780 - DNA, 19 bp, Artificial Sequence
  Target HLA Sequence complement
gggcggctgtggtggtgcc

SEQ ID NO: 13781 - DNA, 19 bp, Artificial Sequence
  Target HLA Sequence complement
ggcggctgtggtggtgcct

SEQ ID NO: 13782 - DNA, 19 bp, Artificial Sequence
  Target HLA Sequence complement
gcggctgtggtggtgcctt

SEQ ID NO: 13783 - DNA, 19 bp, Artificial Sequence
  Target HLA Sequence complement
cggctgtggtggtgccttc

SEQ ID NO: 13784 - DNA, 19 bp, Artificial Sequence
  Target HLA Sequence complement
ggctgtggtggtgccttct

SEQ ID NO: 13785 - DNA, 19 bp, Artificial Sequence
  Target HLA Sequence complement
gctgtggtggtgccttctg

SEQ ID NO: 13786 - DNA, 19 bp, Artificial Sequence
  Target HLA Sequence complement
ctgtggtggtgccttctgg

SEQ ID NO: 13787 - DNA, 19 bp, Artificial Sequence
  Target HLA Sequence complement
gtggtggtgccttctggac

SEQ ID NO: 13788 - DNA, 19 bp, Artificial Sequence
  Target HLA Sequence complement
ggtggtgccttctggacag

SEQ ID NO: 13789 - DNA, 19 bp, Artificial Sequence
  Target HLA Sequence complement
gtggtgccttctggacagg

SEQ ID NO: 13790 - DNA, 19 bp, Artificial Sequence
  Target HLA Sequence complement
ggtgccttctggacaggag

SEQ ID NO: 13791 - DNA, 19 bp, Artificial Sequence
  Target HLA Sequence complement
gtgccttctggacaggagc

SEQ ID NO: 13792 - DNA, 19 bp, Artificial Sequence
  Target HLA Sequence complement
gccttctggacaggagcag

SEQ ID NO: 13793 - DNA, 19 bp, Artificial Sequence
  Target HLA Sequence complement
gccatgtgcagcatgaggg

SEQ ID NO: 13794 - DNA, 19 bp, Artificial Sequence
  Target HLA Sequence complement
gcagcatgagggtttgccc

SEQ ID NO: 13795 - DNA, 19 bp, Artificial Sequence
  Target HLA Sequence complement
tgagggtttgcccaagccc

SEQ ID NO: 13796 - DNA, 19 bp, Artificial Sequence
  Target HLA Sequence complement
gagggtttgcccaagcccc

SEQ ID NO: 13797 - DNA, 19 bp, Artificial Sequence
  Target HLA Sequence complement
agggtttgcccaagcccct

SEQ ID NO: 13798 - DNA, 19 bp, Artificial Sequence
  Target HLA Sequence complement
gggtttgcccaagcccctc

SEQ ID NO: 13799 - DNA, 19 bp, Artificial Sequence
  Target HLA Sequence complement
ggtttgcccaagcccctca

SEQ ID NO: 13800 - DNA, 19 bp, Artificial Sequence
  Target HLA Sequence complement
gtttgcccaagcccctcac

SEQ ID NO: 13801 - DNA, 19 bp, Artificial Sequence
  Target HLA Sequence complement
tttgcccaagcccctcacc

SEQ ID NO: 13802 - DNA, 19 bp, Artificial Sequence
  Target HLA Sequence complement
ttgcccaagcccctcaccc

SEQ ID NO: 13803 - DNA, 19 bp, Artificial Sequence
  Target HLA Sequence complement
tgcccaagcccctcaccct

SEQ ID NO: 13804 - DNA, 19 bp, Artificial Sequence
  Target HLA Sequence complement
gcccaagcccctcaccctg

SEQ ID NO: 13805 - DNA, 19 bp, Artificial Sequence
  Target HLA Sequence complement
cccaagcccctcaccctga

SEQ ID NO: 13806 - DNA, 19 bp, Artificial Sequence
  Target HLA Sequence complement
ccaagcccctcaccctgag

SEQ ID NO: 13807 - DNA, 19 bp, Artificial Sequence
  Target HLA Sequence complement
caagcccctcaccctgaga

SEQ ID NO: 13808 - DNA, 19 bp, Artificial Sequence
  Target HLA Sequence complement
agcccctcaccctgagatg

SEQ ID NO: 13809 - DNA, 19 bp, Artificial Sequence
  Target HLA Sequence complement
gcccctcaccctgagatgg

SEQ ID NO: 13810 - DNA, 19 bp, Artificial Sequence
  Target HLA Sequence complement
cccctcaccctgagatggg

SEQ ID NO: 13811 - DNA, 19 bp, Artificial Sequence
  Target HLA Sequence complement
ccctcaccctgagatggga

SEQ ID NO: 13812 - DNA, 19 bp, Artificial Sequence
  Target HLA Sequence complement
cctcaccctgagatgggag

SEQ ID NO: 13813 - DNA, 19 bp, Artificial Sequence
  Target HLA Sequence complement
ctcaccctgagatgggagc

SEQ ID NO: 13814 - DNA, 19 bp, Artificial Sequence
  Target HLA Sequence complement
tcaccctgagatgggagcc

SEQ ID NO: 13815 - DNA, 19 bp, Artificial Sequence
  Target HLA Sequence complement
caccctgagatgggagccg

SEQ ID NO: 13816 - DNA, 19 bp, Artificial Sequence
  Target HLA Sequence complement
accctgagatgggagccgt

SEQ ID NO: 13817 - DNA, 19 bp, Artificial Sequence
  Target HLA Sequence complement
ccctgagatgggagccgtc

SEQ ID NO: 13818 - DNA, 19 bp, Artificial Sequence
  Target HLA Sequence complement
cctgagatgggagccgtct

SEQ ID NO: 13819 - DNA, 19 bp, Artificial Sequence
  Target HLA Sequence complement
gagatgggagccgtcttcc

SEQ ID NO: 13820 - DNA, 19 bp, Artificial Sequence
  Target HLA Sequence complement
agatgggagccgtcttccc

SEQ ID NO: 13821 - DNA, 19 bp, Artificial Sequence
  Target HLA Sequence complement
gatgggagccgtcttccca

SEQ ID NO: 13822 - DNA, 19 bp, Artificial Sequence
  Target HLA Sequence complement
atgggagccgtcttcccag

SEQ ID NO: 13823 - DNA, 19 bp, Artificial Sequence
  Target HLA Sequence complement
tgggagccgtcttcccagc

SEQ ID NO: 13824 - DNA, 19 bp, Artificial Sequence
  Target HLA Sequence complement
gggagccgtcttcccagcc

SEQ ID NO: 13825 - DNA, 19 bp, Artificial Sequence
  Target HLA Sequence complement
ggagccgtcttcccagccc

SEQ ID NO: 13826 - DNA, 19 bp, Artificial Sequence
  Target HLA Sequence complement
gagccgtcttcccagccca

SEQ ID NO: 13827 - DNA, 19 bp, Artificial Sequence
  Target HLA Sequence complement
agccgtcttcccagcccac

SEQ ID NO: 13828 - DNA, 19 bp, Artificial Sequence
  Target HLA Sequence complement
gccgtcttcccagcccacc

SEQ ID NO: 13829 - DNA, 19 bp, Artificial Sequence
  Target HLA Sequence complement
ccgtcttcccagcccacca

SEQ ID NO: 13830 - DNA, 19 bp, Artificial Sequence
  Target HLA Sequence complement
cgtcttcccagcccaccat

SEQ ID NO: 13831 - DNA, 19 bp, Artificial Sequence
  Target HLA Sequence complement
gtcttcccagcccaccatc

SEQ ID NO: 13832 - DNA, 19 bp, Artificial Sequence
  Target HLA Sequence complement
tcttcccagcccaccatcc

SEQ ID NO: 13833 - DNA, 19 bp, Artificial Sequence
  Target HLA Sequence complement
cttcccagcccaccatccc

SEQ ID NO: 13834 - DNA, 19 bp, Artificial Sequence
  Target HLA Sequence complement
ttcccagcccaccatcccc

SEQ ID NO: 13835 - DNA, 19 bp, Artificial Sequence
  Target HLA Sequence complement
tcccagcccaccatcccca

SEQ ID NO: 13836 - DNA, 19 bp, Artificial Sequence
  Target HLA Sequence complement
cccagcccaccatccccat

SEQ ID NO: 13837 - DNA, 19 bp, Artificial Sequence
  Target HLA Sequence complement
ccagcccaccatccccatc

SEQ ID NO: 13838 - DNA, 19 bp, Artificial Sequence
  Target HLA Sequence complement
cagcccaccatccccatcg

SEQ ID NO: 13839 - DNA, 19 bp, Artificial Sequence
  Target HLA Sequence complement
agcccaccatccccatcgt

SEQ ID NO: 13840 - DNA, 19 bp, Artificial Sequence
  Target HLA Sequence complement
gcccaccatccccatcgtg

SEQ ID NO: 13841 - DNA, 19 bp, Artificial Sequence
  Target HLA Sequence complement
cccaccatccccatcgtgg

SEQ ID NO: 13842 - DNA, 19 bp, Artificial Sequence
  Target HLA Sequence complement
ccaccatccccatcgtggg

SEQ ID NO: 13843 - DNA, 19 bp, Artificial Sequence
  Target HLA Sequence complement
caccatccccatcgtgggc

SEQ ID NO: 13844 - DNA, 19 bp, Artificial Sequence
  Target HLA Sequence complement
accatccccatcgtgggca

SEQ ID NO: 13845 - DNA, 19 bp, Artificial Sequence
  Target HLA Sequence complement
ccatccccatcgtgggcat

SEQ ID NO: 13846 - DNA, 19 bp, Artificial Sequence
  Target HLA Sequence complement
catccccatcgtgggcatc

SEQ ID NO: 13847 - DNA, 19 bp, Artificial Sequence
  Target HLA Sequence complement
cgtgggcatcattgctggc

SEQ ID NO: 13848 - DNA, 19 bp, Artificial Sequence
  Target HLA Sequence complement
gtgggcatcattgctggcc

SEQ ID NO: 13849 - DNA, 19 bp, Artificial Sequence
  Target HLA Sequence complement
gggcatcattgctggcctg

SEQ ID NO: 13850 - DNA, 19 bp, Artificial Sequence
  Target HLA Sequence complement
ggcatcattgctggcctgg

SEQ ID NO: 13851 - DNA, 19 bp, Artificial Sequence
  Target HLA Sequence complement
tcactggagctgtggtcgc

SEQ ID NO: 13852 - DNA, 19 bp, Artificial Sequence
  Target HLA Sequence complement
cactggagctgtggtcgct

SEQ ID NO: 13853 - DNA, 19 bp, Artificial Sequence
  Target HLA Sequence complement
actggagctgtggtcgctg

SEQ ID NO: 13854 - DNA, 19 bp, Artificial Sequence
  Target HLA Sequence complement
ctggagctgtggtcgctgc

SEQ ID NO: 13855 - DNA, 19 bp, Artificial Sequence
  Target HLA Sequence complement
tggagctgtggtcgctgct

SEQ ID NO: 13856 - DNA, 19 bp, Artificial Sequence
  Target HLA Sequence complement
ggagctgtggtcgctgctg

SEQ ID NO: 13857 - DNA, 19 bp, Artificial Sequence
  Target HLA Sequence complement
gagctgtggtcgctgctgt

SEQ ID NO: 13858 - DNA, 19 bp, Artificial Sequence
  Target HLA Sequence complement
agctgtggtcgctgctgtg

SEQ ID NO: 13859 - DNA, 19 bp, Artificial Sequence
  Target HLA Sequence complement
gctgtggtcgctgctgtga

SEQ ID NO: 13860 - DNA, 19 bp, Artificial Sequence
  Target HLA Sequence complement
ggtcgctgctgtgatgtgg

SEQ ID NO: 13861 - DNA, 19 bp, Artificial Sequence
  Target HLA Sequence complement
cgctgctgtgatgtggagg

SEQ ID NO: 13862 - DNA, 19 bp, Artificial Sequence
  Target HLA Sequence complement
ggagggagctactctcagg

SEQ ID NO: 13863 - DNA, 19 bp, Artificial Sequence
  Target HLA Sequence complement
gagggagctactctcaggc

SEQ ID NO: 13864 - DNA, 19 bp, Artificial Sequence
  Target HLA Sequence complement
gggagctactctcaggctg

SEQ ID NO: 13865 - DNA, 19 bp, Artificial Sequence
  Target HLA Sequence complement
ggagctactctcaggctgc

SEQ ID NO: 13866 - DNA, 19 bp, Artificial Sequence
  Target HLA Sequence complement
gcaagcagtgacagtgccc

SEQ ID NO: 13867 - DNA, 19 bp, Artificial Sequence
  Target HLA Sequence complement
agcagtgacagtgcccagg

SEQ ID NO: 13868 - DNA, 19 bp, Artificial Sequence
  Target HLA Sequence complement
gcagtgacagtgcccaggg

SEQ ID NO: 13869 - DNA, 19 bp, Artificial Sequence
  Target HLA Sequence complement
cagtgacagtgcccagggc

SEQ ID NO: 13870 - DNA, 19 bp, Artificial Sequence
  Target HLA Sequence complement
agtgacagtgcccagggct

SEQ ID NO: 13871 - DNA, 19 bp, Artificial Sequence
  Target HLA Sequence complement
gtgacagtgcccagggctc

SEQ ID NO: 13872 - DNA, 19 bp, Artificial Sequence
  Target HLA Sequence complement
tgacagtgcccagggctct

SEQ ID NO: 13873 - DNA, 19 bp, Artificial Sequence
  Target HLA Sequence complement
gacagtgcccagggctctg

SEQ ID NO: 13874 - DNA, 19 bp, Artificial Sequence
  Target HLA Sequence complement
acagtgcccagggctctga

SEQ ID NO: 13875 - DNA, 19 bp, Artificial Sequence
  Target HLA Sequence complement
cagtgcccagggctctgat

SEQ ID NO: 13876 - DNA, 19 bp, Artificial Sequence
  Target HLA Sequence complement
agtgcccagggctctgatg

SEQ ID NO: 13877 - DNA, 19 bp, Artificial Sequence
  Target HLA Sequence complement
gtgcccagggctctgatgt

SEQ ID NO: 13878 - DNA, 19 bp, Artificial Sequence
  Target HLA Sequence complement
tgcccagggctctgatgtg

SEQ ID NO: 13879 - DNA, 19 bp, Artificial Sequence
  Target HLA Sequence complement
gcccagggctctgatgtgt

SEQ ID NO: 13880 - DNA, 19 bp, Artificial Sequence
  Target HLA Sequence complement
cccagggctctgatgtgtc

SEQ ID NO: 13881 - DNA, 19 bp, Artificial Sequence
  Target HLA Sequence complement
gacagctgccttgtgtggg

SEQ ID NO: 13882 - DNA, 19 bp, Artificial Sequence
  Target HLA Sequence complement
cagctgccttgtgtgggac

SEQ ID NO: 13883 - DNA, 19 bp, Artificial Sequence
  Target HLA Sequence complement
gctgccttgtgtgggactg

SEQ ID NO: 13884 - DNA, 19 bp, Artificial Sequence
  Target HLA Sequence complement
tgtgaggaggtggggagac

SEQ ID NO: 13885 - DNA, 19 bp, Artificial Sequence
  Target HLA Sequence complement
gtgaggaggtggggagacc

SEQ ID NO: 13886 - DNA, 19 bp, Artificial Sequence
  Target HLA Sequence complement
tgaggaggtggggagacca

SEQ ID NO: 13887 - DNA, 19 bp, Artificial Sequence
  Target HLA Sequence complement
gaggaggtggggagaccac

SEQ ID NO: 13888 - DNA, 19 bp, Artificial Sequence
  Target HLA Sequence complement
aggaggtggggagaccacc

SEQ ID NO: 13889 - DNA, 19 bp, Artificial Sequence
  Target HLA Sequence complement
ggaggtggggagaccaccc

SEQ ID NO: 13890 - DNA, 19 bp, Artificial Sequence
  Target HLA Sequence complement
gaggtggggagaccacccc

SEQ ID NO: 13891 - DNA, 19 bp, Artificial Sequence
  Target HLA Sequence complement
aggtggggagaccacccca

SEQ ID NO: 13892 - DNA, 19 bp, Artificial Sequence
  Target HLA Sequence complement
ggtggggagaccaccccac

SEQ ID NO: 13893 - DNA, 19 bp, Artificial Sequence
  Target HLA Sequence complement
gtggggagaccaccccacc

SEQ ID NO: 13894 - DNA, 19 bp, Artificial Sequence
  Target HLA Sequence complement
tggggagaccaccccaccc

SEQ ID NO: 13895 - DNA, 19 bp, Artificial Sequence
  Target HLA Sequence complement
ggggagaccaccccacccc

SEQ ID NO: 13896 - DNA, 19 bp, Artificial Sequence
  Target HLA Sequence complement
gggagaccaccccaccccc

SEQ ID NO: 13897 - DNA, 19 bp, Artificial Sequence
  Target HLA Sequence complement
ggagaccaccccaccccca

SEQ ID NO: 13898 - DNA, 19 bp, Artificial Sequence
  Target HLA Sequence complement
gagaccaccccacccccat

SEQ ID NO: 13899 - DNA, 19 bp, Artificial Sequence
  Target HLA Sequence complement
agaccaccccacccccatg

SEQ ID NO: 13900 - DNA, 19 bp, Artificial Sequence
  Target HLA Sequence complement
gaccaccccacccccatgt

SEQ ID NO: 13901 - DNA, 19 bp, Artificial Sequence
  Target HLA Sequence complement
accaccccacccccatgtc

SEQ ID NO: 13902 - DNA, 19 bp, Artificial Sequence
  Target HLA Sequence complement
ccaccccacccccatgtcc

SEQ ID NO: 13903 - DNA, 19 bp, Artificial Sequence
  Target HLA Sequence complement
caccccacccccatgtcca

SEQ ID NO: 13904 - DNA, 19 bp, Artificial Sequence
  Target HLA Sequence complement
accccacccccatgtccac

SEQ ID NO: 13905 - DNA, 19 bp, Artificial Sequence
  Target HLA Sequence complement
ccccacccccatgtccacc

SEQ ID NO: 13906 - DNA, 19 bp, Artificial Sequence
  Target HLA Sequence complement
cccacccccatgtccacca

SEQ ID NO: 13907 - DNA, 19 bp, Artificial Sequence
  Target HLA Sequence complement
ccacccccatgtccaccat

SEQ ID NO: 13908 - DNA, 19 bp, Artificial Sequence
  Target HLA Sequence complement
cacccccatgtccaccatg

SEQ ID NO: 13909 - DNA, 19 bp, Artificial Sequence
  Target HLA Sequence complement
cccccatgtccaccatgac

SEQ ID NO: 13910 - DNA, 19 bp, Artificial Sequence
  Target HLA Sequence complement
ccccatgtccaccatgacc

SEQ ID NO: 13911 - DNA, 19 bp, Artificial Sequence
  Target HLA Sequence complement
cccatgtccaccatgaccc

SEQ ID NO: 13912 - DNA, 19 bp, Artificial Sequence
  Target HLA Sequence complement
ccaccatgaccctcttccc

SEQ ID NO: 13913 - DNA, 19 bp, Artificial Sequence
  Target HLA Sequence complement
ccatgaccctcttcccacg

SEQ ID NO: 13914 - DNA, 19 bp, Artificial Sequence
  Target HLA Sequence complement
catgaccctcttcccacgc

SEQ ID NO: 13915 - DNA, 19 bp, Artificial Sequence
  Target HLA Sequence complement
tgaccctcttcccacgctg

SEQ ID NO: 13916 - DNA, 19 bp, Artificial Sequence
  Target HLA Sequence complement
gaccctcttcccacgctga

SEQ ID NO: 13917 - DNA, 19 bp, Artificial Sequence
  Target HLA Sequence complement
accctcttcccacgctgac

SEQ ID NO: 13918 - DNA, 19 bp, Artificial Sequence
  Target HLA Sequence complement
ccctcttcccacgctgacc

SEQ ID NO: 13919 - DNA, 19 bp, Artificial Sequence
  Target HLA Sequence complement
cctcttcccacgctgacct

SEQ ID NO: 13920 - DNA, 19 bp, Artificial Sequence
  Target HLA Sequence complement
ctcttcccacgctgacctg

SEQ ID NO: 13921 - DNA, 19 bp, Artificial Sequence
  Target HLA Sequence complement
cttcccacgctgacctgtg

SEQ ID NO: 13922 - DNA, 19 bp, Artificial Sequence
  Target HLA Sequence complement
ttcccacgctgacctgtgc

SEQ ID NO: 13923 - DNA, 19 bp, Artificial Sequence
  Target HLA Sequence complement
tcccacgctgacctgtgct

SEQ ID NO: 13924 - DNA, 19 bp, Artificial Sequence
  Target HLA Sequence complement
cccacgctgacctgtgctc

SEQ ID NO: 13925 - DNA, 19 bp, Artificial Sequence
  Target HLA Sequence complement
ccacgctgacctgtgctcc

SEQ ID NO: 13926 - DNA, 19 bp, Artificial Sequence
  Target HLA Sequence complement
cacgctgacctgtgctccc

SEQ ID NO: 13927 - DNA, 19 bp, Artificial Sequence
  Target HLA Sequence complement
acgctgacctgtgctccct

SEQ ID NO: 13928 - DNA, 19 bp, Artificial Sequence
  Target HLA Sequence complement
cgctgacctgtgctccctc

SEQ ID NO: 13929 - DNA, 19 bp, Artificial Sequence
  Target HLA Sequence complement
gctgacctgtgctccctcc

SEQ ID NO: 13930 - DNA, 19 bp, Artificial Sequence
  Target HLA Sequence complement
ctgacctgtgctccctccc

SEQ ID NO: 13931 - DNA, 19 bp, Artificial Sequence
  Target HLA Sequence complement
tgacctgtgctccctcccc

SEQ ID NO: 13932 - DNA, 19 bp, Artificial Sequence
  Target HLA Sequence complement
gacctgtgctccctcccca

SEQ ID NO: 13933 - DNA, 19 bp, Artificial Sequence
  Target HLA Sequence complement
acctgtgctccctccccaa

SEQ ID NO: 13934 - DNA, 19 bp, Artificial Sequence
  Target HLA Sequence complement
cctgtgctccctccccaat

SEQ ID NO: 13935 - DNA, 19 bp, Artificial Sequence
  Target HLA Sequence complement
ctgtgctccctccccaatc

SEQ ID NO: 13936 - DNA, 19 bp, Artificial Sequence
  Target HLA Sequence complement
cctgttccagagaggtggg

SEQ ID NO: 13937 - DNA, 19 bp, Artificial Sequence
  Target HLA Sequence complement
ctgttccagagaggtgggg

SEQ ID NO: 13938 - DNA, 19 bp, Artificial Sequence
  Target HLA Sequence complement
tgttccagagaggtggggc

SEQ ID NO: 13939 - DNA, 19 bp, Artificial Sequence
  Target HLA Sequence complement
gttccagagaggtggggct

SEQ ID NO: 13940 - DNA, 19 bp, Artificial Sequence
  Target HLA Sequence complement
ttccagagaggtggggctg

SEQ ID NO: 13941 - DNA, 19 bp, Artificial Sequence
  Target HLA Sequence complement
tccagagaggtggggctga

SEQ ID NO: 13942 - DNA, 19 bp, Artificial Sequence
  Target HLA Sequence complement
ccagagaggtggggctgag

SEQ ID NO: 13943 - DNA, 19 bp, Artificial Sequence
  Target HLA Sequence complement
cagagaggtggggctgagg

SEQ ID NO: 13944 - DNA, 19 bp, Artificial Sequence
  Target HLA Sequence complement
agagaggtggggctgaggt

SEQ ID NO: 13945 - DNA, 19 bp, Artificial Sequence
  Target HLA Sequence complement
gagaggtggggctgaggtg

SEQ ID NO: 13946 - DNA, 19 bp, Artificial Sequence
  Target HLA Sequence complement
agaggtggggctgaggtgt

SEQ ID NO: 13947 - DNA, 19 bp, Artificial Sequence
  Target HLA Sequence complement
gaggtggggctgaggtgtc

SEQ ID NO: 13948 - DNA, 19 bp, Artificial Sequence
  Target HLA Sequence complement
aggtggggctgaggtgtct

SEQ ID NO: 13949 - DNA, 19 bp, Artificial Sequence
  Target HLA Sequence complement
ggtggggctgaggtgtctc

SEQ ID NO: 13950 - DNA, 19 bp, Artificial Sequence
  Target HLA Sequence complement
gtggggctgaggtgtctcc

SEQ ID NO: 13951 - DNA, 19 bp, Artificial Sequence
  Target HLA Sequence complement
tggggctgaggtgtctcca

SEQ ID NO: 13952 - DNA, 19 bp, Artificial Sequence
  Target HLA Sequence complement
ggggctgaggtgtctccat

SEQ ID NO: 13953 - DNA, 19 bp, Artificial Sequence
  Target HLA Sequence complement
gggctgaggtgtctccatc

SEQ ID NO: 13954 - DNA, 20 bp, Artificial Sequence
  Target HLA Sequence complement
cagaagcagaggggtcaggg

SEQ ID NO: 13955 - DNA, 20 bp, Artificial Sequence
  Target HLA Sequence complement
agaagcagaggggtcagggc

SEQ ID NO: 13956 - DNA, 20 bp, Artificial Sequence
  Target HLA Sequence complement
gaagcagaggggtcagggcg

SEQ ID NO: 13957 - DNA, 20 bp, Artificial Sequence
  Target HLA Sequence complement
aagcagaggggtcagggcga

SEQ ID NO: 13958 - DNA, 20 bp, Artificial Sequence
  Target HLA Sequence complement
agcagaggggtcagggcgaa

SEQ ID NO: 13959 - DNA, 20 bp, Artificial Sequence
  Target HLA Sequence complement
gcagaggggtcagggcgaag

SEQ ID NO: 13960 - DNA, 20 bp, Artificial Sequence
  Target HLA Sequence complement
cagaggggtcagggcgaagt

SEQ ID NO: 13961 - DNA, 20 bp, Artificial Sequence
  Target HLA Sequence complement
agaggggtcagggcgaagtc

SEQ ID NO: 13962 - DNA, 20 bp, Artificial Sequence
  Target HLA Sequence complement
gaggggtcagggcgaagtcc

SEQ ID NO: 13963 - DNA, 20 bp, Artificial Sequence
  Target HLA Sequence complement
aggggtcagggcgaagtccc

SEQ ID NO: 13964 - DNA, 20 bp, Artificial Sequence
  Target HLA Sequence complement
ggggtcagggcgaagtccca

SEQ ID NO: 13965 - DNA, 20 bp, Artificial Sequence
  Target HLA Sequence complement
gggtcagggcgaagtcccag

SEQ ID NO: 13966 - DNA, 20 bp, Artificial Sequence
  Target HLA Sequence complement
ggtcagggcgaagtcccagg

SEQ ID NO: 13967 - DNA, 20 bp, Artificial Sequence
  Target HLA Sequence complement
gtcagggcgaagtcccaggg

SEQ ID NO: 13968 - DNA, 20 bp, Artificial Sequence
  Target HLA Sequence complement
tcagggcgaagtcccagggc

SEQ ID NO: 13969 - DNA, 20 bp, Artificial Sequence
  Target HLA Sequence complement
cagggcgaagtcccagggcc

SEQ ID NO: 13970 - DNA, 20 bp, Artificial Sequence
  Target HLA Sequence complement
agggcgaagtcccagggccc

SEQ ID NO: 13971 - DNA, 20 bp, Artificial Sequence
  Target HLA Sequence complement
gggcgaagtcccagggcccc

SEQ ID NO: 13972 - DNA, 20 bp, Artificial Sequence
  Target HLA Sequence complement
ggcgaagtcccagggcccca

SEQ ID NO: 13973 - DNA, 20 bp, Artificial Sequence
  Target HLA Sequence complement
gcgaagtcccagggccccag

SEQ ID NO: 13974 - DNA, 20 bp, Artificial Sequence
  Target HLA Sequence complement
cgaagtcccagggccccagg

SEQ ID NO: 13975 - DNA, 20 bp, Artificial Sequence
  Target HLA Sequence complement
gaagtcccagggccccaggc

SEQ ID NO: 13976 - DNA, 20 bp, Artificial Sequence
  Target HLA Sequence complement
aagtcccagggccccaggcg

SEQ ID NO: 13977 - DNA, 20 bp, Artificial Sequence
  Target HLA Sequence complement
agtcccagggccccaggcgt

SEQ ID NO: 13978 - DNA, 20 bp, Artificial Sequence
  Target HLA Sequence complement
gtcccagggccccaggcgtg

SEQ ID NO: 13979 - DNA, 20 bp, Artificial Sequence
  Target HLA Sequence complement
tcccagggccccaggcgtgg

SEQ ID NO: 13980 - DNA, 20 bp, Artificial Sequence
  Target HLA Sequence complement
cccagggccccaggcgtggc

SEQ ID NO: 13981 - DNA, 20 bp, Artificial Sequence
  Target HLA Sequence complement
ccagggccccaggcgtggct

SEQ ID NO: 13982 - DNA, 20 bp, Artificial Sequence
  Target HLA Sequence complement
cagggccccaggcgtggctc

SEQ ID NO: 13983 - DNA, 20 bp, Artificial Sequence
  Target HLA Sequence complement
agggccccaggcgtggctct

SEQ ID NO: 13984 - DNA, 20 bp, Artificial Sequence
  Target HLA Sequence complement
gggccccaggcgtggctctc

SEQ ID NO: 13985 - DNA, 20 bp, Artificial Sequence
  Target HLA Sequence complement
ggccccaggcgtggctctca

SEQ ID NO: 13986 - DNA, 20 bp, Artificial Sequence
  Target HLA Sequence complement
gccccaggcgtggctctcag

SEQ ID NO: 13987 - DNA, 20 bp, Artificial Sequence
  Target HLA Sequence complement
ccccaggcgtggctctcagg

SEQ ID NO: 13988 - DNA, 20 bp, Artificial Sequence
  Target HLA Sequence complement
cccaggcgtggctctcaggg

SEQ ID NO: 13989 - DNA, 20 bp, Artificial Sequence
  Target HLA Sequence complement
ccaggcgtggctctcagggt

SEQ ID NO: 13990 - DNA, 20 bp, Artificial Sequence
  Target HLA Sequence complement
caggcgtggctctcagggtc

SEQ ID NO: 13991 - DNA, 20 bp, Artificial Sequence
  Target HLA Sequence complement
aggcgtggctctcagggtct

SEQ ID NO: 13992 - DNA, 20 bp, Artificial Sequence
  Target HLA Sequence complement
ggcgtggctctcagggtctc

SEQ ID NO: 13993 - DNA, 20 bp, Artificial Sequence
  Target HLA Sequence complement
gcgtggctctcagggtctca

SEQ ID NO: 13994 - DNA, 20 bp, Artificial Sequence
  Target HLA Sequence complement
cgtggctctcagggtctcag

SEQ ID NO: 13995 - DNA, 20 bp, Artificial Sequence
  Target HLA Sequence complement
gtggctctcagggtctcagg

SEQ ID NO: 13996 - DNA, 20 bp, Artificial Sequence
  Target HLA Sequence complement
tggctctcagggtctcaggc

SEQ ID NO: 13997 - DNA, 20 bp, Artificial Sequence
  Target HLA Sequence complement
ggctctcagggtctcaggcc

SEQ ID NO: 13998 - DNA, 20 bp, Artificial Sequence
  Target HLA Sequence complement
gctctcagggtctcaggccc

SEQ ID NO: 13999 - DNA, 20 bp, Artificial Sequence
  Target HLA Sequence complement
ctctcagggtctcaggcccc

SEQ ID NO: 14000 - DNA, 20 bp, Artificial Sequence
  Target HLA Sequence complement
tctcagggtctcaggccccg

SEQ ID NO: 14001 - DNA, 20 bp, Artificial Sequence
  Target HLA Sequence complement
ctcagggtctcaggccccga

SEQ ID NO: 14002 - DNA, 20 bp, Artificial Sequence
  Target HLA Sequence complement
tcagggtctcaggccccgaa

SEQ ID NO: 14003 - DNA, 20 bp, Artificial Sequence
  Target HLA Sequence complement
cagggtctcaggccccgaag

SEQ ID NO: 14004 - DNA, 20 bp, Artificial Sequence
  Target HLA Sequence complement
agggtctcaggccccgaagg

SEQ ID NO: 14005 - DNA, 20 bp, Artificial Sequence
  Target HLA Sequence complement
gggtctcaggccccgaaggc

SEQ ID NO: 14006 - DNA, 20 bp, Artificial Sequence
  Target HLA Sequence complement
ggtctcaggccccgaaggcg

SEQ ID NO: 14007 - DNA, 20 bp, Artificial Sequence
  Target HLA Sequence complement
gtctcaggccccgaaggcgg

SEQ ID NO: 14008 - DNA, 20 bp, Artificial Sequence
  Target HLA Sequence complement
tctcaggccccgaaggcggt

SEQ ID NO: 14009 - DNA, 20 bp, Artificial Sequence
  Target HLA Sequence complement
ctcaggccccgaaggcggtg

SEQ ID NO: 14010 - DNA, 20 bp, Artificial Sequence
  Target HLA Sequence complement
tcaggccccgaaggcggtgt

SEQ ID NO: 14011 - DNA, 20 bp, Artificial Sequence
  Target HLA Sequence complement
caggccccgaaggcggtgta

SEQ ID NO: 14012 - DNA, 20 bp, Artificial Sequence
  Target HLA Sequence complement
aggccccgaaggcggtgtat

SEQ ID NO: 14013 - DNA, 20 bp, Artificial Sequence
  Target HLA Sequence complement
ggccccgaaggcggtgtatg

SEQ ID NO: 14014 - DNA, 20 bp, Artificial Sequence
  Target HLA Sequence complement
gccccgaaggcggtgtatgg

SEQ ID NO: 14015 - DNA, 20 bp, Artificial Sequence
  Target HLA Sequence complement
ccccgaaggcggtgtatgga

SEQ ID NO: 14016 - DNA, 20 bp, Artificial Sequence
  Target HLA Sequence complement
cccgaaggcggtgtatggat

SEQ ID NO: 14017 - DNA, 20 bp, Artificial Sequence
  Target HLA Sequence complement
aggcggtgtatggattgggg

SEQ ID NO: 14018 - DNA, 20 bp, Artificial Sequence
  Target HLA Sequence complement
ggcggtgtatggattgggga

SEQ ID NO: 14019 - DNA, 20 bp, Artificial Sequence
  Target HLA Sequence complement
gcggtgtatggattggggag

SEQ ID NO: 14020 - DNA, 20 bp, Artificial Sequence
  Target HLA Sequence complement
atggattggggagtcccagc

SEQ ID NO: 14021 - DNA, 20 bp, Artificial Sequence
  Target HLA Sequence complement
tggattggggagtcccagcc

SEQ ID NO: 14022 - DNA, 20 bp, Artificial Sequence
  Target HLA Sequence complement
ggattggggagtcccagcct

SEQ ID NO: 14023 - DNA, 20 bp, Artificial Sequence
  Target HLA Sequence complement
gattggggagtcccagcctt

SEQ ID NO: 14024 - DNA, 20 bp, Artificial Sequence
  Target HLA Sequence complement
attggggagtcccagccttg

SEQ ID NO: 14025 - DNA, 20 bp, Artificial Sequence
  Target HLA Sequence complement
ttggggagtcccagccttgg

SEQ ID NO: 14026 - DNA, 20 bp, Artificial Sequence
  Target HLA Sequence complement
tggggagtcccagccttggg

SEQ ID NO: 14027 - DNA, 20 bp, Artificial Sequence
  Target HLA Sequence complement
ggggagtcccagccttgggg

SEQ ID NO: 14028 - DNA, 20 bp, Artificial Sequence
  Target HLA Sequence complement
gggagtcccagccttgggga

SEQ ID NO: 14029 - DNA, 20 bp, Artificial Sequence
  Target HLA Sequence complement
ggagtcccagccttggggat

SEQ ID NO: 14030 - DNA, 20 bp, Artificial Sequence
  Target HLA Sequence complement
gagtcccagccttggggatt

SEQ ID NO: 14031 - DNA, 20 bp, Artificial Sequence
  Target HLA Sequence complement
agtcccagccttggggattc

SEQ ID NO: 14032 - DNA, 20 bp, Artificial Sequence
  Target HLA Sequence complement
gtcccagccttggggattcc

SEQ ID NO: 14033 - DNA, 20 bp, Artificial Sequence
  Target HLA Sequence complement
tcccagccttggggattccc

SEQ ID NO: 14034 - DNA, 20 bp, Artificial Sequence
  Target HLA Sequence complement
cccagccttggggattcccc

SEQ ID NO: 14035 - DNA, 20 bp, Artificial Sequence
  Target HLA Sequence complement
ccagccttggggattcccca

SEQ ID NO: 14036 - DNA, 20 bp, Artificial Sequence
  Target HLA Sequence complement
cagccttggggattccccaa

SEQ ID NO: 14037 - DNA, 20 bp, Artificial Sequence
  Target HLA Sequence complement
agccttggggattccccaac

SEQ ID NO: 14038 - DNA, 20 bp, Artificial Sequence
  Target HLA Sequence complement
gccttggggattccccaact

SEQ ID NO: 14039 - DNA, 20 bp, Artificial Sequence
  Target HLA Sequence complement
ccttggggattccccaactc

SEQ ID NO: 14040 - DNA, 20 bp, Artificial Sequence
  Target HLA Sequence complement
cttggggattccccaactcc

SEQ ID NO: 14041 - DNA, 20 bp, Artificial Sequence
  Target HLA Sequence complement
ttggggattccccaactccg

SEQ ID NO: 14042 - DNA, 20 bp, Artificial Sequence
  Target HLA Sequence complement
tggggattccccaactccgc

SEQ ID NO: 14043 - DNA, 20 bp, Artificial Sequence
  Target HLA Sequence complement
ggggattccccaactccgca

SEQ ID NO: 14044 - DNA, 20 bp, Artificial Sequence
  Target HLA Sequence complement
gggattccccaactccgcag

SEQ ID NO: 14045 - DNA, 20 bp, Artificial Sequence
  Target HLA Sequence complement
ggattccccaactccgcagt

SEQ ID NO: 14046 - DNA, 20 bp, Artificial Sequence
  Target HLA Sequence complement
tcctggatactcacgacgcg

SEQ ID NO: 14047 - DNA, 20 bp, Artificial Sequence
  Target HLA Sequence complement
cctggatactcacgacgcgg

SEQ ID NO: 14048 - DNA, 20 bp, Artificial Sequence
  Target HLA Sequence complement
ctggatactcacgacgcgga

SEQ ID NO: 14049 - DNA, 20 bp, Artificial Sequence
  Target HLA Sequence complement
tggatactcacgacgcggac

SEQ ID NO: 14050 - DNA, 20 bp, Artificial Sequence
  Target HLA Sequence complement
ggatactcacgacgcggacc

SEQ ID NO: 14051 - DNA, 20 bp, Artificial Sequence
  Target HLA Sequence complement
gatactcacgacgcggaccc

SEQ ID NO: 14052 - DNA, 20 bp, Artificial Sequence
  Target HLA Sequence complement
atactcacgacgcggaccca

SEQ ID NO: 14053 - DNA, 20 bp, Artificial Sequence
  Target HLA Sequence complement
tactcacgacgcggacccag

SEQ ID NO: 14054 - DNA, 20 bp, Artificial Sequence
  Target HLA Sequence complement
actcacgacgcggacccagt

SEQ ID NO: 14055 - DNA, 20 bp, Artificial Sequence
  Target HLA Sequence complement
ctcacgacgcggacccagtt

SEQ ID NO: 14056 - DNA, 20 bp, Artificial Sequence
  Target HLA Sequence complement
tcacgacgcggacccagttc

SEQ ID NO: 14057 - DNA, 20 bp, Artificial Sequence
  Target HLA Sequence complement
cacgacgcggacccagttct

SEQ ID NO: 14058 - DNA, 20 bp, Artificial Sequence
  Target HLA Sequence complement
acgacgcggacccagttctc

SEQ ID NO: 14059 - DNA, 20 bp, Artificial Sequence
  Target HLA Sequence complement
cgacgcggacccagttctca

SEQ ID NO: 14060 - DNA, 20 bp, Artificial Sequence
  Target HLA Sequence complement
gacgcggacccagttctcac

SEQ ID NO: 14061 - DNA, 20 bp, Artificial Sequence
  Target HLA Sequence complement
acgcggacccagttctcact

SEQ ID NO: 14062 - DNA, 20 bp, Artificial Sequence
  Target HLA Sequence complement
cgcggacccagttctcactc

SEQ ID NO: 14063 - DNA, 20 bp, Artificial Sequence
  Target HLA Sequence complement
gcggacccagttctcactcc

SEQ ID NO: 14064 - DNA, 20 bp, Artificial Sequence
  Target HLA Sequence complement
cggacccagttctcactccc

SEQ ID NO: 14065 - DNA, 20 bp, Artificial Sequence
  Target HLA Sequence complement
ggacccagttctcactccca

SEQ ID NO: 14066 - DNA, 20 bp, Artificial Sequence
  Target HLA Sequence complement
ctcactcccattgggtgtcg

SEQ ID NO: 14067 - DNA, 20 bp, Artificial Sequence
  Target HLA Sequence complement
tcactcccattgggtgtcgg

SEQ ID NO: 14068 - DNA, 20 bp, Artificial Sequence
  Target HLA Sequence complement
cactcccattgggtgtcggg

SEQ ID NO: 14069 - DNA, 20 bp, Artificial Sequence
  Target HLA Sequence complement
actcccattgggtgtcgggt

SEQ ID NO: 14070 - DNA, 20 bp, Artificial Sequence
  Target HLA Sequence complement
ctcccattgggtgtcgggtt

SEQ ID NO: 14071 - DNA, 20 bp, Artificial Sequence
  Target HLA Sequence complement
cccattgggtgtcgggtttc

SEQ ID NO: 14072 - DNA, 20 bp, Artificial Sequence
  Target HLA Sequence complement
ccattgggtgtcgggtttcc

SEQ ID NO: 14073 - DNA, 20 bp, Artificial Sequence
  Target HLA Sequence complement
tgggtgtcgggtttccagag

SEQ ID NO: 14074 - DNA, 20 bp, Artificial Sequence
  Target HLA Sequence complement
gggtgtcgggtttccagaga

SEQ ID NO: 14075 - DNA, 20 bp, Artificial Sequence
  Target HLA Sequence complement
gtcgggtttccagagaagcc

SEQ ID NO: 14076 - DNA, 20 bp, Artificial Sequence
  Target HLA Sequence complement
agccaatcagtgtcgtcgcg

SEQ ID NO: 14077 - DNA, 20 bp, Artificial Sequence
  Target HLA Sequence complement
gccaatcagtgtcgtcgcgg

SEQ ID NO: 14078 - DNA, 20 bp, Artificial Sequence
  Target HLA Sequence complement
ccaatcagtgtcgtcgcggt

SEQ ID NO: 14079 - DNA, 20 bp, Artificial Sequence
  Target HLA Sequence complement
caatcagtgtcgtcgcggtc

SEQ ID NO: 14080 - DNA, 20 bp, Artificial Sequence
  Target HLA Sequence complement
aatcagtgtcgtcgcggtcg

SEQ ID NO: 14081 - DNA, 20 bp, Artificial Sequence
  Target HLA Sequence complement
atcagtgtcgtcgcggtcgc

SEQ ID NO: 14082 - DNA, 20 bp, Artificial Sequence
  Target HLA Sequence complement
tcagtgtcgtcgcggtcgcg

SEQ ID NO: 14083 - DNA, 20 bp, Artificial Sequence
  Target HLA Sequence complement
cagtgtcgtcgcggtcgcgg

SEQ ID NO: 14084 - DNA, 20 bp, Artificial Sequence
  Target HLA Sequence complement
agtgtcgtcgcggtcgcggt

SEQ ID NO: 14085 - DNA, 20 bp, Artificial Sequence
  Target HLA Sequence complement
gtgtcgtcgcggtcgcggtt

SEQ ID NO: 14086 - DNA, 20 bp, Artificial Sequence
  Target HLA Sequence complement
tgtcgtcgcggtcgcggttc

SEQ ID NO: 14087 - DNA, 20 bp, Artificial Sequence
  Target HLA Sequence complement
gtcgtcgcggtcgcggttct

SEQ ID NO: 14088 - DNA, 20 bp, Artificial Sequence
  Target HLA Sequence complement
tcgtcgcggtcgcggttcta

SEQ ID NO: 14089 - DNA, 20 bp, Artificial Sequence
  Target HLA Sequence complement
cgtcgcggtcgcggttctaa

SEQ ID NO: 14090 - DNA, 20 bp, Artificial Sequence
  Target HLA Sequence complement
gtcgcggtcgcggttctaaa

SEQ ID NO: 14091 - DNA, 20 bp, Artificial Sequence
  Target HLA Sequence complement
tcgcggtcgcggttctaaag

SEQ ID NO: 14092 - DNA, 20 bp, Artificial Sequence
  Target HLA Sequence complement
cgcggtcgcggttctaaagt

SEQ ID NO: 14093 - DNA, 20 bp, Artificial Sequence
  Target HLA Sequence complement
gcggtcgcggttctaaagtc

SEQ ID NO: 14094 - DNA, 20 bp, Artificial Sequence
  Target HLA Sequence complement
cggtcgcggttctaaagtcc

SEQ ID NO: 14095 - DNA, 20 bp, Artificial Sequence
  Target HLA Sequence complement
ggtcgcggttctaaagtccg

SEQ ID NO: 14096 - DNA, 20 bp, Artificial Sequence
  Target HLA Sequence complement
gtcgcggttctaaagtccgc

SEQ ID NO: 14097 - DNA, 20 bp, Artificial Sequence
  Target HLA Sequence complement
cgcggttctaaagtccgcac

SEQ ID NO: 14098 - DNA, 20 bp, Artificial Sequence
  Target HLA Sequence complement
gcggttctaaagtccgcacg

SEQ ID NO: 14099 - DNA, 20 bp, Artificial Sequence
  Target HLA Sequence complement
cggttctaaagtccgcacgc

SEQ ID NO: 14100 - DNA, 20 bp, Artificial Sequence
  Target HLA Sequence complement
tctaaagtccgcacgcaccc

SEQ ID NO: 14101 - DNA, 20 bp, Artificial Sequence
  Target HLA Sequence complement
ctaaagtccgcacgcaccca

SEQ ID NO: 14102 - DNA, 20 bp, Artificial Sequence
  Target HLA Sequence complement
taaagtccgcacgcacccac

SEQ ID NO: 14103 - DNA, 20 bp, Artificial Sequence
  Target HLA Sequence complement
aaagtccgcacgcacccacc

SEQ ID NO: 14104 - DNA, 20 bp, Artificial Sequence
  Target HLA Sequence complement
aagtccgcacgcacccaccg

SEQ ID NO: 14105 - DNA, 20 bp, Artificial Sequence
  Target HLA Sequence complement
agtccgcacgcacccaccgg

SEQ ID NO: 14106 - DNA, 20 bp, Artificial Sequence
  Target HLA Sequence complement
gtccgcacgcacccaccggg

SEQ ID NO: 14107 - DNA, 20 bp, Artificial Sequence
  Target HLA Sequence complement
tccgcacgcacccaccggga

SEQ ID NO: 14108 - DNA, 20 bp, Artificial Sequence
  Target HLA Sequence complement
ccgcacgcacccaccgggac

SEQ ID NO: 14109 - DNA, 20 bp, Artificial Sequence
  Target HLA Sequence complement
cgcacgcacccaccgggact

SEQ ID NO: 14110 - DNA, 20 bp, Artificial Sequence
  Target HLA Sequence complement
gcacgcacccaccgggactc

SEQ ID NO: 14111 - DNA, 20 bp, Artificial Sequence
  Target HLA Sequence complement
cacgcacccaccgggactca

SEQ ID NO: 14112 - DNA, 20 bp, Artificial Sequence
  Target HLA Sequence complement
acgcacccaccgggactcag

SEQ ID NO: 14113 - DNA, 20 bp, Artificial Sequence
  Target HLA Sequence complement
cgcacccaccgggactcaga

SEQ ID NO: 14114 - DNA, 20 bp, Artificial Sequence
  Target HLA Sequence complement
gcacccaccgggactcagat

SEQ ID NO: 14115 - DNA, 20 bp, Artificial Sequence
  Target HLA Sequence complement
cacccaccgggactcagatt

SEQ ID NO: 14116 - DNA, 20 bp, Artificial Sequence
  Target HLA Sequence complement
acccaccgggactcagattc

SEQ ID NO: 14117 - DNA, 20 bp, Artificial Sequence
  Target HLA Sequence complement
cccaccgggactcagattct

SEQ ID NO: 14118 - DNA, 20 bp, Artificial Sequence
  Target HLA Sequence complement
ccaccgggactcagattctc

SEQ ID NO: 14119 - DNA, 20 bp, Artificial Sequence
  Target HLA Sequence complement
caccgggactcagattctcc

SEQ ID NO: 14120 - DNA, 20 bp, Artificial Sequence
  Target HLA Sequence complement
accgggactcagattctccc

SEQ ID NO: 14121 - DNA, 20 bp, Artificial Sequence
  Target HLA Sequence complement
ccgggactcagattctcccc

SEQ ID NO: 14122 - DNA, 20 bp, Artificial Sequence
  Target HLA Sequence complement
cgggactcagattctcccca

SEQ ID NO: 14123 - DNA, 20 bp, Artificial Sequence
  Target HLA Sequence complement
gggactcagattctccccag

SEQ ID NO: 14124 - DNA, 20 bp, Artificial Sequence
  Target HLA Sequence complement
ctcagattctccccagacgc

SEQ ID NO: 14125 - DNA, 20 bp, Artificial Sequence
  Target HLA Sequence complement
tcagattctccccagacgcc

SEQ ID NO: 14126 - DNA, 20 bp, Artificial Sequence
  Target HLA Sequence complement
cagattctccccagacgccg

SEQ ID NO: 14127 - DNA, 20 bp, Artificial Sequence
  Target HLA Sequence complement
agattctccccagacgccga

SEQ ID NO: 14128 - DNA, 20 bp, Artificial Sequence
  Target HLA Sequence complement
gattctccccagacgccgag

SEQ ID NO: 14129 - DNA, 20 bp, Artificial Sequence
  Target HLA Sequence complement
attctccccagacgccgagg

SEQ ID NO: 14130 - DNA, 20 bp, Artificial Sequence
  Target HLA Sequence complement
ttctccccagacgccgagga

SEQ ID NO: 14131 - DNA, 20 bp, Artificial Sequence
  Target HLA Sequence complement
tctccccagacgccgaggat

SEQ ID NO: 14132 - DNA, 20 bp, Artificial Sequence
  Target HLA Sequence complement
ctccccagacgccgaggatg

SEQ ID NO: 14133 - DNA, 20 bp, Artificial Sequence
  Target HLA Sequence complement
tccccagacgccgaggatgg

SEQ ID NO: 14134 - DNA, 20 bp, Artificial Sequence
  Target HLA Sequence complement
ccccagacgccgaggatggc

SEQ ID NO: 14135 - DNA, 20 bp, Artificial Sequence
  Target HLA Sequence complement
cccagacgccgaggatggcc

SEQ ID NO: 14136 - DNA, 20 bp, Artificial Sequence
  Target HLA Sequence complement
ccagacgccgaggatggccg

SEQ ID NO: 14137 - DNA, 20 bp, Artificial Sequence
  Target HLA Sequence complement
cagacgccgaggatggccgt

SEQ ID NO: 14138 - DNA, 20 bp, Artificial Sequence
  Target HLA Sequence complement
agacgccgaggatggccgtc

SEQ ID NO: 14139 - DNA, 20 bp, Artificial Sequence
  Target HLA Sequence complement
gacgccgaggatggccgtca

SEQ ID NO: 14140 - DNA, 20 bp, Artificial Sequence
  Target HLA Sequence complement
acgccgaggatggccgtcat

SEQ ID NO: 14141 - DNA, 20 bp, Artificial Sequence
  Target HLA Sequence complement
cgccgaggatggccgtcatg

SEQ ID NO: 14142 - DNA, 20 bp, Artificial Sequence
  Target HLA Sequence complement
gccgaggatggccgtcatgg

SEQ ID NO: 14143 - DNA, 20 bp, Artificial Sequence
  Target HLA Sequence complement
ccgaggatggccgtcatggc

SEQ ID NO: 14144 - DNA, 20 bp, Artificial Sequence
  Target HLA Sequence complement
cgaggatggccgtcatggcg

SEQ ID NO: 14145 - DNA, 20 bp, Artificial Sequence
  Target HLA Sequence complement
gaggatggccgtcatggcgc

SEQ ID NO: 14146 - DNA, 20 bp, Artificial Sequence
  Target HLA Sequence complement
aggatggccgtcatggcgcc

SEQ ID NO: 14147 - DNA, 20 bp, Artificial Sequence
  Target HLA Sequence complement
ggatggccgtcatggcgccc

SEQ ID NO: 14148 - DNA, 20 bp, Artificial Sequence
  Target HLA Sequence complement
gatggccgtcatggcgcccc

SEQ ID NO: 14149 - DNA, 20 bp, Artificial Sequence
  Target HLA Sequence complement
atggccgtcatggcgccccg

SEQ ID NO: 14150 - DNA, 20 bp, Artificial Sequence
  Target HLA Sequence complement
tggccgtcatggcgccccga

SEQ ID NO: 14151 - DNA, 20 bp, Artificial Sequence
  Target HLA Sequence complement
ggccgtcatggcgccccgaa

SEQ ID NO: 14152 - DNA, 20 bp, Artificial Sequence
  Target HLA Sequence complement
gccgtcatggcgccccgaac

SEQ ID NO: 14153 - DNA, 20 bp, Artificial Sequence
  Target HLA Sequence complement
ccgtcatggcgccccgaacc

SEQ ID NO: 14154 - DNA, 20 bp, Artificial Sequence
  Target HLA Sequence complement
cgtcatggcgccccgaaccc

SEQ ID NO: 14155 - DNA, 20 bp, Artificial Sequence
  Target HLA Sequence complement
gtcatggcgccccgaaccct

SEQ ID NO: 14156 - DNA, 20 bp, Artificial Sequence
  Target HLA Sequence complement
tcatggcgccccgaaccctc

SEQ ID NO: 14157 - DNA, 20 bp, Artificial Sequence
  Target HLA Sequence complement
catggcgccccgaaccctcg

SEQ ID NO: 14158 - DNA, 20 bp, Artificial Sequence
  Target HLA Sequence complement
atggcgccccgaaccctcgt

SEQ ID NO: 14159 - DNA, 20 bp, Artificial Sequence
  Target HLA Sequence complement
tggcgccccgaaccctcgtc

SEQ ID NO: 14160 - DNA, 20 bp, Artificial Sequence
  Target HLA Sequence complement
ggcgccccgaaccctcgtcc

SEQ ID NO: 14161 - DNA, 20 bp, Artificial Sequence
  Target HLA Sequence complement
gcgccccgaaccctcgtcct

SEQ ID NO: 14162 - DNA, 20 bp, Artificial Sequence
  Target HLA Sequence complement
cgccccgaaccctcgtcctg

SEQ ID NO: 14163 - DNA, 20 bp, Artificial Sequence
  Target HLA Sequence complement
gccccgaaccctcgtcctgc

SEQ ID NO: 14164 - DNA, 20 bp, Artificial Sequence
  Target HLA Sequence complement
ccccgaaccctcgtcctgct

SEQ ID NO: 14165 - DNA, 20 bp, Artificial Sequence
  Target HLA Sequence complement
cccgaaccctcgtcctgcta

SEQ ID NO: 14166 - DNA, 20 bp, Artificial Sequence
  Target HLA Sequence complement
ccgaaccctcgtcctgctac

SEQ ID NO: 14167 - DNA, 20 bp, Artificial Sequence
  Target HLA Sequence complement
cgaaccctcgtcctgctact

SEQ ID NO: 14168 - DNA, 20 bp, Artificial Sequence
  Target HLA Sequence complement
gaaccctcgtcctgctactc

SEQ ID NO: 14169 - DNA, 20 bp, Artificial Sequence
  Target HLA Sequence complement
accctcgtcctgctactctc

SEQ ID NO: 14170 - DNA, 20 bp, Artificial Sequence
  Target HLA Sequence complement
ccctcgtcctgctactctcg

SEQ ID NO: 14171 - DNA, 20 bp, Artificial Sequence
  Target HLA Sequence complement
cctcgtcctgctactctcgg

SEQ ID NO: 14172 - DNA, 20 bp, Artificial Sequence
  Target HLA Sequence complement
ctcgtcctgctactctcggg

SEQ ID NO: 14173 - DNA, 20 bp, Artificial Sequence
  Target HLA Sequence complement
tcgtcctgctactctcgggg

SEQ ID NO: 14174 - DNA, 20 bp, Artificial Sequence
  Target HLA Sequence complement
cgtcctgctactctcggggg

SEQ ID NO: 14175 - DNA, 20 bp, Artificial Sequence
  Target HLA Sequence complement
gtcctgctactctcgggggc

SEQ ID NO: 14176 - DNA, 20 bp, Artificial Sequence
  Target HLA Sequence complement
tcctgctactctcgggggct

SEQ ID NO: 14177 - DNA, 20 bp, Artificial Sequence
  Target HLA Sequence complement
cctgctactctcgggggctc

SEQ ID NO: 14178 - DNA, 20 bp, Artificial Sequence
  Target HLA Sequence complement
ctgctactctcgggggctct

SEQ ID NO: 14179 - DNA, 20 bp, Artificial Sequence
  Target HLA Sequence complement
tgctactctcgggggctctg

SEQ ID NO: 14180 - DNA, 20 bp, Artificial Sequence
  Target HLA Sequence complement
gctactctcgggggctctgg

SEQ ID NO: 14181 - DNA, 20 bp, Artificial Sequence
  Target HLA Sequence complement
ctactctcgggggctctggc

SEQ ID NO: 14182 - DNA, 20 bp, Artificial Sequence
  Target HLA Sequence complement
tactctcgggggctctggcc

SEQ ID NO: 14183 - DNA, 20 bp, Artificial Sequence
  Target HLA Sequence complement
actctcgggggctctggccc

SEQ ID NO: 14184 - DNA, 20 bp, Artificial Sequence
  Target HLA Sequence complement
ctctcgggggctctggccct

SEQ ID NO: 14185 - DNA, 20 bp, Artificial Sequence
  Target HLA Sequence complement
tctcgggggctctggccctg

SEQ ID NO: 14186 - DNA, 20 bp, Artificial Sequence
  Target HLA Sequence complement
ctcgggggctctggccctga

SEQ ID NO: 14187 - DNA, 20 bp, Artificial Sequence
  Target HLA Sequence complement
tcgggggctctggccctgac

SEQ ID NO: 14188 - DNA, 20 bp, Artificial Sequence
  Target HLA Sequence complement
cgggggctctggccctgacc

SEQ ID NO: 14189 - DNA, 20 bp, Artificial Sequence
  Target HLA Sequence complement
gggggctctggccctgaccc

SEQ ID NO: 14190 - DNA, 20 bp, Artificial Sequence
  Target HLA Sequence complement
ggggctctggccctgaccca

SEQ ID NO: 14191 - DNA, 20 bp, Artificial Sequence
  Target HLA Sequence complement
gggctctggccctgacccag

SEQ ID NO: 14192 - DNA, 20 bp, Artificial Sequence
  Target HLA Sequence complement
ggctctggccctgacccaga

SEQ ID NO: 14193 - DNA, 20 bp, Artificial Sequence
  Target HLA Sequence complement
gctctggccctgacccagac

SEQ ID NO: 14194 - DNA, 20 bp, Artificial Sequence
  Target HLA Sequence complement
ctctggccctgacccagacc

SEQ ID NO: 14195 - DNA, 20 bp, Artificial Sequence
  Target HLA Sequence complement
tctggccctgacccagacct

SEQ ID NO: 14196 - DNA, 20 bp, Artificial Sequence
  Target HLA Sequence complement
ctggccctgacccagacctg

SEQ ID NO: 14197 - DNA, 20 bp, Artificial Sequence
  Target HLA Sequence complement
tggccctgacccagacctgg

SEQ ID NO: 14198 - DNA, 20 bp, Artificial Sequence
  Target HLA Sequence complement
ggccctgacccagacctggg

SEQ ID NO: 14199 - DNA, 20 bp, Artificial Sequence
  Target HLA Sequence complement
gccctgacccagacctgggc

SEQ ID NO: 14200 - DNA, 20 bp, Artificial Sequence
  Target HLA Sequence complement
ccctgacccagacctgggcg

SEQ ID NO: 14201 - DNA, 20 bp, Artificial Sequence
  Target HLA Sequence complement
cctgacccagacctgggcgg

SEQ ID NO: 14202 - DNA, 20 bp, Artificial Sequence
  Target HLA Sequence complement
ctgacccagacctgggcggg

SEQ ID NO: 14203 - DNA, 20 bp, Artificial Sequence
  Target HLA Sequence complement
tgacccagacctgggcgggc

SEQ ID NO: 14204 - DNA, 20 bp, Artificial Sequence
  Target HLA Sequence complement
gacccagacctgggcgggct

SEQ ID NO: 14205 - DNA, 20 bp, Artificial Sequence
  Target HLA Sequence complement
acccagacctgggcgggctc

SEQ ID NO: 14206 - DNA, 20 bp, Artificial Sequence
  Target HLA Sequence complement
cccagacctgggcgggctct

SEQ ID NO: 14207 - DNA, 20 bp, Artificial Sequence
  Target HLA Sequence complement
ccagacctgggcgggctctc

SEQ ID NO: 14208 - DNA, 20 bp, Artificial Sequence
  Target HLA Sequence complement
cagacctgggcgggctctca

SEQ ID NO: 14209 - DNA, 20 bp, Artificial Sequence
  Target HLA Sequence complement
agacctgggcgggctctcac

SEQ ID NO: 14210 - DNA, 20 bp, Artificial Sequence
  Target HLA Sequence complement
gacctgggcgggctctcact

SEQ ID NO: 14211 - DNA, 20 bp, Artificial Sequence
  Target HLA Sequence complement
acctgggcgggctctcactc

SEQ ID NO: 14212 - DNA, 20 bp, Artificial Sequence
  Target HLA Sequence complement
cctgggcgggctctcactcc

SEQ ID NO: 14213 - DNA, 20 bp, Artificial Sequence
  Target HLA Sequence complement
ctgggcgggctctcactcca

SEQ ID NO: 14214 - DNA, 20 bp, Artificial Sequence
  Target HLA Sequence complement
tgggcgggctctcactccat

SEQ ID NO: 14215 - DNA, 20 bp, Artificial Sequence
  Target HLA Sequence complement
gggcgggctctcactccatg

SEQ ID NO: 14216 - DNA, 20 bp, Artificial Sequence
  Target HLA Sequence complement
ggcgggctctcactccatga

SEQ ID NO: 14217 - DNA, 20 bp, Artificial Sequence
  Target HLA Sequence complement
gcgggctctcactccatgag

SEQ ID NO: 14218 - DNA, 20 bp, Artificial Sequence
  Target HLA Sequence complement
cgggctctcactccatgagg

SEQ ID NO: 14219 - DNA, 20 bp, Artificial Sequence
  Target HLA Sequence complement
gggctctcactccatgaggt

SEQ ID NO: 14220 - DNA, 20 bp, Artificial Sequence
  Target HLA Sequence complement
tcttcacatccgtgtcccgg

SEQ ID NO: 14221 - DNA, 20 bp, Artificial Sequence
  Target HLA Sequence complement
cttcacatccgtgtcccggc

SEQ ID NO: 14222 - DNA, 20 bp, Artificial Sequence
  Target HLA Sequence complement
ttcacatccgtgtcccggcc

SEQ ID NO: 14223 - DNA, 20 bp, Artificial Sequence
  Target HLA Sequence complement
tcacatccgtgtcccggccc

SEQ ID NO: 14224 - DNA, 20 bp, Artificial Sequence
  Target HLA Sequence complement
cacatccgtgtcccggcccg

SEQ ID NO: 14225 - DNA, 20 bp, Artificial Sequence
  Target HLA Sequence complement
acatccgtgtcccggcccgg

SEQ ID NO: 14226 - DNA, 20 bp, Artificial Sequence
  Target HLA Sequence complement
catccgtgtcccggcccggc

SEQ ID NO: 14227 - DNA, 20 bp, Artificial Sequence
  Target HLA Sequence complement
atccgtgtcccggcccggcc

SEQ ID NO: 14228 - DNA, 20 bp, Artificial Sequence
  Target HLA Sequence complement
tccgtgtcccggcccggccg

SEQ ID NO: 14229 - DNA, 20 bp, Artificial Sequence
  Target HLA Sequence complement
ccgtgtcccggcccggccgc

SEQ ID NO: 14230 - DNA, 20 bp, Artificial Sequence
  Target HLA Sequence complement
cgtgtcccggcccggccgcg

SEQ ID NO: 14231 - DNA, 20 bp, Artificial Sequence
  Target HLA Sequence complement
gtgtcccggcccggccgcgg

SEQ ID NO: 14232 - DNA, 20 bp, Artificial Sequence
  Target HLA Sequence complement
tgtcccggcccggccgcggg

SEQ ID NO: 14233 - DNA, 20 bp, Artificial Sequence
  Target HLA Sequence complement
gtcccggcccggccgcgggg

SEQ ID NO: 14234 - DNA, 20 bp, Artificial Sequence
  Target HLA Sequence complement
tcccggcccggccgcgggga

SEQ ID NO: 14235 - DNA, 20 bp, Artificial Sequence
  Target HLA Sequence complement
cccggcccggccgcggggag

SEQ ID NO: 14236 - DNA, 20 bp, Artificial Sequence
  Target HLA Sequence complement
ccggcccggccgcggggagc

SEQ ID NO: 14237 - DNA, 20 bp, Artificial Sequence
  Target HLA Sequence complement
cggcccggccgcggggagcc

SEQ ID NO: 14238 - DNA, 20 bp, Artificial Sequence
  Target HLA Sequence complement
ggcccggccgcggggagccc

SEQ ID NO: 14239 - DNA, 20 bp, Artificial Sequence
  Target HLA Sequence complement
gcccggccgcggggagcccc

SEQ ID NO: 14240 - DNA, 20 bp, Artificial Sequence
  Target HLA Sequence complement
cccggccgcggggagccccg

SEQ ID NO: 14241 - DNA, 20 bp, Artificial Sequence
  Target HLA Sequence complement
ccggccgcggggagccccgc

SEQ ID NO: 14242 - DNA, 20 bp, Artificial Sequence
  Target HLA Sequence complement
cggccgcggggagccccgct

SEQ ID NO: 14243 - DNA, 20 bp, Artificial Sequence
  Target HLA Sequence complement
ggccgcggggagccccgctt

SEQ ID NO: 14244 - DNA, 20 bp, Artificial Sequence
  Target HLA Sequence complement
gccgcggggagccccgcttc

SEQ ID NO: 14245 - DNA, 20 bp, Artificial Sequence
  Target HLA Sequence complement
ccgcggggagccccgcttca

SEQ ID NO: 14246 - DNA, 20 bp, Artificial Sequence
  Target HLA Sequence complement
cgcggggagccccgcttcat

SEQ ID NO: 14247 - DNA, 20 bp, Artificial Sequence
  Target HLA Sequence complement
gcggggagccccgcttcatc

SEQ ID NO: 14248 - DNA, 20 bp, Artificial Sequence
  Target HLA Sequence complement
cggggagccccgcttcatcg

SEQ ID NO: 14249 - DNA, 20 bp, Artificial Sequence
  Target HLA Sequence complement
ggggagccccgcttcatcgc

SEQ ID NO: 14250 - DNA, 20 bp, Artificial Sequence
  Target HLA Sequence complement
gggagccccgcttcatcgca

SEQ ID NO: 14251 - DNA, 20 bp, Artificial Sequence
  Target HLA Sequence complement
ggagccccgcttcatcgcag

SEQ ID NO: 14252 - DNA, 20 bp, Artificial Sequence
  Target HLA Sequence complement
gagccccgcttcatcgcagt

SEQ ID NO: 14253 - DNA, 20 bp, Artificial Sequence
  Target HLA Sequence complement
agccccgcttcatcgcagtg

SEQ ID NO: 14254 - DNA, 20 bp, Artificial Sequence
  Target HLA Sequence complement
gccccgcttcatcgcagtgg

SEQ ID NO: 14255 - DNA, 20 bp, Artificial Sequence
  Target HLA Sequence complement
ccccgcttcatcgcagtggg

SEQ ID NO: 14256 - DNA, 20 bp, Artificial Sequence
  Target HLA Sequence complement
cccgcttcatcgcagtgggc

SEQ ID NO: 14257 - DNA, 20 bp, Artificial Sequence
  Target HLA Sequence complement
ccgcttcatcgcagtgggct

SEQ ID NO: 14258 - DNA, 20 bp, Artificial Sequence
  Target HLA Sequence complement
cgcttcatcgcagtgggcta

SEQ ID NO: 14259 - DNA, 20 bp, Artificial Sequence
  Target HLA Sequence complement
gcttcatcgcagtgggctac

SEQ ID NO: 14260 - DNA, 20 bp, Artificial Sequence
  Target HLA Sequence complement
cttcatcgcagtgggctacg

SEQ ID NO: 14261 - DNA, 20 bp, Artificial Sequence
  Target HLA Sequence complement
tcatcgcagtgggctacgtg

SEQ ID NO: 14262 - DNA, 20 bp, Artificial Sequence
  Target HLA Sequence complement
catcgcagtgggctacgtgg

SEQ ID NO: 14263 - DNA, 20 bp, Artificial Sequence
  Target HLA Sequence complement
atcgcagtgggctacgtgga

SEQ ID NO: 14264 - DNA, 20 bp, Artificial Sequence
  Target HLA Sequence complement
tcgcagtgggctacgtggac

SEQ ID NO: 14265 - DNA, 20 bp, Artificial Sequence
  Target HLA Sequence complement
cgcagtgggctacgtggacg

SEQ ID NO: 14266 - DNA, 20 bp, Artificial Sequence
  Target HLA Sequence complement
gcagtgggctacgtggacga

SEQ ID NO: 14267 - DNA, 20 bp, Artificial Sequence
  Target HLA Sequence complement
cagtgggctacgtggacgac

SEQ ID NO: 14268 - DNA, 20 bp, Artificial Sequence
  Target HLA Sequence complement
agtgggctacgtggacgaca

SEQ ID NO: 14269 - DNA, 20 bp, Artificial Sequence
  Target HLA Sequence complement
gtgggctacgtggacgacac

SEQ ID NO: 14270 - DNA, 20 bp, Artificial Sequence
  Target HLA Sequence complement
tgggctacgtggacgacacg

SEQ ID NO: 14271 - DNA, 20 bp, Artificial Sequence
  Target HLA Sequence complement
gggctacgtggacgacacgc

SEQ ID NO: 14272 - DNA, 20 bp, Artificial Sequence
  Target HLA Sequence complement
ggctacgtggacgacacgca

SEQ ID NO: 14273 - DNA, 20 bp, Artificial Sequence
  Target HLA Sequence complement
gctacgtggacgacacgcag

SEQ ID NO: 14274 - DNA, 20 bp, Artificial Sequence
  Target HLA Sequence complement
ctacgtggacgacacgcagt

SEQ ID NO: 14275 - DNA, 20 bp, Artificial Sequence
  Target HLA Sequence complement
acgtggacgacacgcagttc

SEQ ID NO: 14276 - DNA, 20 bp, Artificial Sequence
  Target HLA Sequence complement
cgtggacgacacgcagttcg

SEQ ID NO: 14277 - DNA, 20 bp, Artificial Sequence
  Target HLA Sequence complement
gtggacgacacgcagttcgt

SEQ ID NO: 14278 - DNA, 20 bp, Artificial Sequence
  Target HLA Sequence complement
tggacgacacgcagttcgtg

SEQ ID NO: 14279 - DNA, 20 bp, Artificial Sequence
  Target HLA Sequence complement
ggacgacacgcagttcgtgc

SEQ ID NO: 14280 - DNA, 20 bp, Artificial Sequence
  Target HLA Sequence complement
gacgacacgcagttcgtgcg

SEQ ID NO: 14281 - DNA, 20 bp, Artificial Sequence
  Target HLA Sequence complement
acgacacgcagttcgtgcgg

SEQ ID NO: 14282 - DNA, 20 bp, Artificial Sequence
  Target HLA Sequence complement
cgacacgcagttcgtgcggt

SEQ ID NO: 14283 - DNA, 20 bp, Artificial Sequence
  Target HLA Sequence complement
gacacgcagttcgtgcggtt

SEQ ID NO: 14284 - DNA, 20 bp, Artificial Sequence
  Target HLA Sequence complement
acacgcagttcgtgcggttc

SEQ ID NO: 14285 - DNA, 20 bp, Artificial Sequence
  Target HLA Sequence complement
cacgcagttcgtgcggttcg

SEQ ID NO: 14286 - DNA, 20 bp, Artificial Sequence
  Target HLA Sequence complement
acgcagttcgtgcggttcga

SEQ ID NO: 14287 - DNA, 20 bp, Artificial Sequence
  Target HLA Sequence complement
cgcagttcgtgcggttcgac

SEQ ID NO: 14288 - DNA, 20 bp, Artificial Sequence
  Target HLA Sequence complement
gcagttcgtgcggttcgaca

SEQ ID NO: 14289 - DNA, 20 bp, Artificial Sequence
  Target HLA Sequence complement
cagttcgtgcggttcgacag

SEQ ID NO: 14290 - DNA, 20 bp, Artificial Sequence
  Target HLA Sequence complement
agttcgtgcggttcgacagc

SEQ ID NO: 14291 - DNA, 20 bp, Artificial Sequence
  Target HLA Sequence complement
gttcgtgcggttcgacagcg

SEQ ID NO: 14292 - DNA, 20 bp, Artificial Sequence
  Target HLA Sequence complement
ttcgtgcggttcgacagcga

SEQ ID NO: 14293 - DNA, 20 bp, Artificial Sequence
  Target HLA Sequence complement
tcgtgcggttcgacagcgac

SEQ ID NO: 14294 - DNA, 20 bp, Artificial Sequence
  Target HLA Sequence complement
cgtgcggttcgacagcgacg

SEQ ID NO: 14295 - DNA, 20 bp, Artificial Sequence
  Target HLA Sequence complement
gtgcggttcgacagcgacgc

SEQ ID NO: 14296 - DNA, 20 bp, Artificial Sequence
  Target HLA Sequence complement
tgcggttcgacagcgacgcc

SEQ ID NO: 14297 - DNA, 20 bp, Artificial Sequence
  Target HLA Sequence complement
gcggttcgacagcgacgccg

SEQ ID NO: 14298 - DNA, 20 bp, Artificial Sequence
  Target HLA Sequence complement
cggttcgacagcgacgccgc

SEQ ID NO: 14299 - DNA, 20 bp, Artificial Sequence
  Target HLA Sequence complement
ggttcgacagcgacgccgcg

SEQ ID NO: 14300 - DNA, 20 bp, Artificial Sequence
  Target HLA Sequence complement
gttcgacagcgacgccgcga

SEQ ID NO: 14301 - DNA, 20 bp, Artificial Sequence
  Target HLA Sequence complement
ttcgacagcgacgccgcgag

SEQ ID NO: 14302 - DNA, 20 bp, Artificial Sequence
  Target HLA Sequence complement
tcgacagcgacgccgcgagc

SEQ ID NO: 14303 - DNA, 20 bp, Artificial Sequence
  Target HLA Sequence complement
cgacagcgacgccgcgagcc

SEQ ID NO: 14304 - DNA, 20 bp, Artificial Sequence
  Target HLA Sequence complement
gacagcgacgccgcgagcca

SEQ ID NO: 14305 - DNA, 20 bp, Artificial Sequence
  Target HLA Sequence complement
acagcgacgccgcgagccag

SEQ ID NO: 14306 - DNA, 20 bp, Artificial Sequence
  Target HLA Sequence complement
cagcgacgccgcgagccaga

SEQ ID NO: 14307 - DNA, 20 bp, Artificial Sequence
  Target HLA Sequence complement
agcgacgccgcgagccagag

SEQ ID NO: 14308 - DNA, 20 bp, Artificial Sequence
  Target HLA Sequence complement
gcgacgccgcgagccagagg

SEQ ID NO: 14309 - DNA, 20 bp, Artificial Sequence
  Target HLA Sequence complement
cgacgccgcgagccagagga

SEQ ID NO: 14310 - DNA, 20 bp, Artificial Sequence
  Target HLA Sequence complement
gacgccgcgagccagaggat

SEQ ID NO: 14311 - DNA, 20 bp, Artificial Sequence
  Target HLA Sequence complement
acgccgcgagccagaggatg

SEQ ID NO: 14312 - DNA, 20 bp, Artificial Sequence
  Target HLA Sequence complement
cgccgcgagccagaggatgg

SEQ ID NO: 14313 - DNA, 20 bp, Artificial Sequence
  Target HLA Sequence complement
gccgcgagccagaggatgga

SEQ ID NO: 14314 - DNA, 20 bp, Artificial Sequence
  Target HLA Sequence complement
ccgcgagccagaggatggag

SEQ ID NO: 14315 - DNA, 20 bp, Artificial Sequence
  Target HLA Sequence complement
cgcgagccagaggatggagc

SEQ ID NO: 14316 - DNA, 20 bp, Artificial Sequence
  Target HLA Sequence complement
gcgagccagaggatggagcc

SEQ ID NO: 14317 - DNA, 20 bp, Artificial Sequence
  Target HLA Sequence complement
cgagccagaggatggagccg

SEQ ID NO: 14318 - DNA, 20 bp, Artificial Sequence
  Target HLA Sequence complement
gagccagaggatggagccgc

SEQ ID NO: 14319 - DNA, 20 bp, Artificial Sequence
  Target HLA Sequence complement
agccagaggatggagccgcg

SEQ ID NO: 14320 - DNA, 20 bp, Artificial Sequence
  Target HLA Sequence complement
gccagaggatggagccgcgg

SEQ ID NO: 14321 - DNA, 20 bp, Artificial Sequence
  Target HLA Sequence complement
ccagaggatggagccgcggg

SEQ ID NO: 14322 - DNA, 20 bp, Artificial Sequence
  Target HLA Sequence complement
cagaggatggagccgcgggc

SEQ ID NO: 14323 - DNA, 20 bp, Artificial Sequence
  Target HLA Sequence complement
agaggatggagccgcgggcg

SEQ ID NO: 14324 - DNA, 20 bp, Artificial Sequence
  Target HLA Sequence complement
gaggatggagccgcgggcgc

SEQ ID NO: 14325 - DNA, 20 bp, Artificial Sequence
  Target HLA Sequence complement
aggatggagccgcgggcgcc

SEQ ID NO: 14326 - DNA, 20 bp, Artificial Sequence
  Target HLA Sequence complement
ggatggagccgcgggcgccg

SEQ ID NO: 14327 - DNA, 20 bp, Artificial Sequence
  Target HLA Sequence complement
gatggagccgcgggcgccgt

SEQ ID NO: 14328 - DNA, 20 bp, Artificial Sequence
  Target HLA Sequence complement
atggagccgcgggcgccgtg

SEQ ID NO: 14329 - DNA, 20 bp, Artificial Sequence
  Target HLA Sequence complement
tggagccgcgggcgccgtgg

SEQ ID NO: 14330 - DNA, 20 bp, Artificial Sequence
  Target HLA Sequence complement
ggagccgcgggcgccgtgga

SEQ ID NO: 14331 - DNA, 20 bp, Artificial Sequence
  Target HLA Sequence complement
gagccgcgggcgccgtggat

SEQ ID NO: 14332 - DNA, 20 bp, Artificial Sequence
  Target HLA Sequence complement
agccgcgggcgccgtggata

SEQ ID NO: 14333 - DNA, 20 bp, Artificial Sequence
  Target HLA Sequence complement
gccgcgggcgccgtggatag

SEQ ID NO: 14334 - DNA, 20 bp, Artificial Sequence
  Target HLA Sequence complement
ccgcgggcgccgtggataga

SEQ ID NO: 14335 - DNA, 20 bp, Artificial Sequence
  Target HLA Sequence complement
cgcgggcgccgtggatagag

SEQ ID NO: 14336 - DNA, 20 bp, Artificial Sequence
  Target HLA Sequence complement
gcgggcgccgtggatagagc

SEQ ID NO: 14337 - DNA, 20 bp, Artificial Sequence
  Target HLA Sequence complement
cgggcgccgtggatagagca

SEQ ID NO: 14338 - DNA, 20 bp, Artificial Sequence
  Target HLA Sequence complement
gggcgccgtggatagagcag

SEQ ID NO: 14339 - DNA, 20 bp, Artificial Sequence
  Target HLA Sequence complement
ggcgccgtggatagagcagg

SEQ ID NO: 14340 - DNA, 20 bp, Artificial Sequence
  Target HLA Sequence complement
gcgccgtggatagagcagga

SEQ ID NO: 14341 - DNA, 20 bp, Artificial Sequence
  Target HLA Sequence complement
cgccgtggatagagcaggag

SEQ ID NO: 14342 - DNA, 20 bp, Artificial Sequence
  Target HLA Sequence complement
gccgtggatagagcaggagg

SEQ ID NO: 14343 - DNA, 20 bp, Artificial Sequence
  Target HLA Sequence complement
ccgtggatagagcaggaggg

SEQ ID NO: 14344 - DNA, 20 bp, Artificial Sequence
  Target HLA Sequence complement
cgtggatagagcaggagggt

SEQ ID NO: 14345 - DNA, 20 bp, Artificial Sequence
  Target HLA Sequence complement
gtggatagagcaggagggtc

SEQ ID NO: 14346 - DNA, 20 bp, Artificial Sequence
  Target HLA Sequence complement
tggatagagcaggagggtcc

SEQ ID NO: 14347 - DNA, 20 bp, Artificial Sequence
  Target HLA Sequence complement
ggatagagcaggagggtccg

SEQ ID NO: 14348 - DNA, 20 bp, Artificial Sequence
  Target HLA Sequence complement
gatagagcaggagggtccgg

SEQ ID NO: 14349 - DNA, 20 bp, Artificial Sequence
  Target HLA Sequence complement
atagagcaggagggtccgga

SEQ ID NO: 14350 - DNA, 20 bp, Artificial Sequence
  Target HLA Sequence complement
tagagcaggagggtccggag

SEQ ID NO: 14351 - DNA, 20 bp, Artificial Sequence
  Target HLA Sequence complement
agagcaggagggtccggagt

SEQ ID NO: 14352 - DNA, 20 bp, Artificial Sequence
  Target HLA Sequence complement
gagcaggagggtccggagta

SEQ ID NO: 14353 - DNA, 20 bp, Artificial Sequence
  Target HLA Sequence complement
agcaggagggtccggagtat

SEQ ID NO: 14354 - DNA, 20 bp, Artificial Sequence
  Target HLA Sequence complement
caggagggtccggagtattg

SEQ ID NO: 14355 - DNA, 20 bp, Artificial Sequence
  Target HLA Sequence complement
aggagggtccggagtattgg

SEQ ID NO: 14356 - DNA, 20 bp, Artificial Sequence
  Target HLA Sequence complement
ggagggtccggagtattggg

SEQ ID NO: 14357 - DNA, 20 bp, Artificial Sequence
  Target HLA Sequence complement
gagggtccggagtattggga

SEQ ID NO: 14358 - DNA, 20 bp, Artificial Sequence
  Target HLA Sequence complement
agggtccggagtattgggac

SEQ ID NO: 14359 - DNA, 20 bp, Artificial Sequence
  Target HLA Sequence complement
gggtccggagtattgggacg

SEQ ID NO: 14360 - DNA, 20 bp, Artificial Sequence
  Target HLA Sequence complement
ggtccggagtattgggacgg

SEQ ID NO: 14361 - DNA, 20 bp, Artificial Sequence
  Target HLA Sequence complement
gtccggagtattgggacggg

SEQ ID NO: 14362 - DNA, 20 bp, Artificial Sequence
  Target HLA Sequence complement
tccggagtattgggacgggg

SEQ ID NO: 14363 - DNA, 20 bp, Artificial Sequence
  Target HLA Sequence complement
ccggagtattgggacgggga

SEQ ID NO: 14364 - DNA, 20 bp, Artificial Sequence
  Target HLA Sequence complement
cggagtattgggacggggag

SEQ ID NO: 14365 - DNA, 20 bp, Artificial Sequence
  Target HLA Sequence complement
ggagtattgggacggggaga

SEQ ID NO: 14366 - DNA, 20 bp, Artificial Sequence
  Target HLA Sequence complement
gagtattgggacggggagac

SEQ ID NO: 14367 - DNA, 20 bp, Artificial Sequence
  Target HLA Sequence complement
gtattgggacggggagacac

SEQ ID NO: 14368 - DNA, 20 bp, Artificial Sequence
  Target HLA Sequence complement
tattgggacggggagacacg

SEQ ID NO: 14369 - DNA, 20 bp, Artificial Sequence
  Target HLA Sequence complement
attgggacggggagacacgg

SEQ ID NO: 14370 - DNA, 20 bp, Artificial Sequence
  Target HLA Sequence complement
ttgggacggggagacacgga

SEQ ID NO: 14371 - DNA, 20 bp, Artificial Sequence
  Target HLA Sequence complement
tgggacggggagacacggaa

SEQ ID NO: 14372 - DNA, 20 bp, Artificial Sequence
  Target HLA Sequence complement
gggacggggagacacggaaa

SEQ ID NO: 14373 - DNA, 20 bp, Artificial Sequence
  Target HLA Sequence complement
gacggggagacacggaaagt

SEQ ID NO: 14374 - DNA, 20 bp, Artificial Sequence
  Target HLA Sequence complement
acggggagacacggaaagtg

SEQ ID NO: 14375 - DNA, 20 bp, Artificial Sequence
  Target HLA Sequence complement
cggggagacacggaaagtga

SEQ ID NO: 14376 - DNA, 20 bp, Artificial Sequence
  Target HLA Sequence complement
gacacggaaagtgaaggccc

SEQ ID NO: 14377 - DNA, 20 bp, Artificial Sequence
  Target HLA Sequence complement
cacggaaagtgaaggcccac

SEQ ID NO: 14378 - DNA, 20 bp, Artificial Sequence
  Target HLA Sequence complement
cggaaagtgaaggcccactc

SEQ ID NO: 14379 - DNA, 20 bp, Artificial Sequence
  Target HLA Sequence complement
gtgaaggcccactcacagac

SEQ ID NO: 14380 - DNA, 20 bp, Artificial Sequence
  Target HLA Sequence complement
gaaggcccactcacagactc

SEQ ID NO: 14381 - DNA, 20 bp, Artificial Sequence
  Target HLA Sequence complement
aggcccactcacagactcac

SEQ ID NO: 14382 - DNA, 20 bp, Artificial Sequence
  Target HLA Sequence complement
ggcccactcacagactcacc

SEQ ID NO: 14383 - DNA, 20 bp, Artificial Sequence
  Target HLA Sequence complement
gcccactcacagactcaccg

SEQ ID NO: 14384 - DNA, 20 bp, Artificial Sequence
  Target HLA Sequence complement
cccactcacagactcaccga

SEQ ID NO: 14385 - DNA, 20 bp, Artificial Sequence
  Target HLA Sequence complement
ccactcacagactcaccgag

SEQ ID NO: 14386 - DNA, 20 bp, Artificial Sequence
  Target HLA Sequence complement
ctcacagactcaccgagtgg

SEQ ID NO: 14387 - DNA, 20 bp, Artificial Sequence
  Target HLA Sequence complement
cacagactcaccgagtggac

SEQ ID NO: 14388 - DNA, 20 bp, Artificial Sequence
  Target HLA Sequence complement
acagactcaccgagtggacc

SEQ ID NO: 14389 - DNA, 20 bp, Artificial Sequence
  Target HLA Sequence complement
cagactcaccgagtggacct

SEQ ID NO: 14390 - DNA, 20 bp, Artificial Sequence
  Target HLA Sequence complement
agactcaccgagtggacctg

SEQ ID NO: 14391 - DNA, 20 bp, Artificial Sequence
  Target HLA Sequence complement
gactcaccgagtggacctgg

SEQ ID NO: 14392 - DNA, 20 bp, Artificial Sequence
  Target HLA Sequence complement
actcaccgagtggacctggg

SEQ ID NO: 14393 - DNA, 20 bp, Artificial Sequence
  Target HLA Sequence complement
ctcaccgagtggacctgggg

SEQ ID NO: 14394 - DNA, 20 bp, Artificial Sequence
  Target HLA Sequence complement
tcaccgagtggacctgggga

SEQ ID NO: 14395 - DNA, 20 bp, Artificial Sequence
  Target HLA Sequence complement
caccgagtggacctggggac

SEQ ID NO: 14396 - DNA, 20 bp, Artificial Sequence
  Target HLA Sequence complement
accgagtggacctggggacc

SEQ ID NO: 14397 - DNA, 20 bp, Artificial Sequence
  Target HLA Sequence complement
ccgagtggacctggggaccc

SEQ ID NO: 14398 - DNA, 20 bp, Artificial Sequence
  Target HLA Sequence complement
cgagtggacctggggaccct

SEQ ID NO: 14399 - DNA, 20 bp, Artificial Sequence
  Target HLA Sequence complement
gagtggacctggggaccctg

SEQ ID NO: 14400 - DNA, 20 bp, Artificial Sequence
  Target HLA Sequence complement
agtggacctggggaccctgc

SEQ ID NO: 14401 - DNA, 20 bp, Artificial Sequence
  Target HLA Sequence complement
gtggacctggggaccctgcg

SEQ ID NO: 14402 - DNA, 20 bp, Artificial Sequence
  Target HLA Sequence complement
tggacctggggaccctgcgc

SEQ ID NO: 14403 - DNA, 20 bp, Artificial Sequence
  Target HLA Sequence complement
ggacctggggaccctgcgcg

SEQ ID NO: 14404 - DNA, 20 bp, Artificial Sequence
  Target HLA Sequence complement
gacctggggaccctgcgcgg

SEQ ID NO: 14405 - DNA, 20 bp, Artificial Sequence
  Target HLA Sequence complement
acctggggaccctgcgcggc

SEQ ID NO: 14406 - DNA, 20 bp, Artificial Sequence
  Target HLA Sequence complement
cctggggaccctgcgcggct

SEQ ID NO: 14407 - DNA, 20 bp, Artificial Sequence
  Target HLA Sequence complement
ctggggaccctgcgcggcta

SEQ ID NO: 14408 - DNA, 20 bp, Artificial Sequence
  Target HLA Sequence complement
tggggaccctgcgcggctac

SEQ ID NO: 14409 - DNA, 20 bp, Artificial Sequence
  Target HLA Sequence complement
ggggaccctgcgcggctact

SEQ ID NO: 14410 - DNA, 20 bp, Artificial Sequence
  Target HLA Sequence complement
gggaccctgcgcggctacta

SEQ ID NO: 14411 - DNA, 20 bp, Artificial Sequence
  Target HLA Sequence complement
ggaccctgcgcggctactac

SEQ ID NO: 14412 - DNA, 20 bp, Artificial Sequence
  Target HLA Sequence complement
gaccctgcgcggctactaca

SEQ ID NO: 14413 - DNA, 20 bp, Artificial Sequence
  Target HLA Sequence complement
accctgcgcggctactacaa

SEQ ID NO: 14414 - DNA, 20 bp, Artificial Sequence
  Target HLA Sequence complement
ccctgcgcggctactacaac

SEQ ID NO: 14415 - DNA, 20 bp, Artificial Sequence
  Target HLA Sequence complement
cctgcgcggctactacaacc

SEQ ID NO: 14416 - DNA, 20 bp, Artificial Sequence
  Target HLA Sequence complement
ctgcgcggctactacaacca

SEQ ID NO: 14417 - DNA, 20 bp, Artificial Sequence
  Target HLA Sequence complement
tgcgcggctactacaaccag

SEQ ID NO: 14418 - DNA, 20 bp, Artificial Sequence
  Target HLA Sequence complement
gcgcggctactacaaccaga

SEQ ID NO: 14419 - DNA, 20 bp, Artificial Sequence
  Target HLA Sequence complement
cgcggctactacaaccagag

SEQ ID NO: 14420 - DNA, 20 bp, Artificial Sequence
  Target HLA Sequence complement
gcggctactacaaccagagc

SEQ ID NO: 14421 - DNA, 20 bp, Artificial Sequence
  Target HLA Sequence complement
cggctactacaaccagagcg

SEQ ID NO: 14422 - DNA, 20 bp, Artificial Sequence
  Target HLA Sequence complement
actacaaccagagcgaggcc

SEQ ID NO: 14423 - DNA, 20 bp, Artificial Sequence
  Target HLA Sequence complement
ctacaaccagagcgaggccg

SEQ ID NO: 14424 - DNA, 20 bp, Artificial Sequence
  Target HLA Sequence complement
tacaaccagagcgaggccgg

SEQ ID NO: 14425 - DNA, 20 bp, Artificial Sequence
  Target HLA Sequence complement
acaaccagagcgaggccggt

SEQ ID NO: 14426 - DNA, 20 bp, Artificial Sequence
  Target HLA Sequence complement
caaccagagcgaggccggtt

SEQ ID NO: 14427 - DNA, 20 bp, Artificial Sequence
  Target HLA Sequence complement
aaccagagcgaggccggttc

SEQ ID NO: 14428 - DNA, 20 bp, Artificial Sequence
  Target HLA Sequence complement
accagagcgaggccggttct

SEQ ID NO: 14429 - DNA, 20 bp, Artificial Sequence
  Target HLA Sequence complement
ccagagcgaggccggttctc

SEQ ID NO: 14430 - DNA, 20 bp, Artificial Sequence
  Target HLA Sequence complement
cagagcgaggccggttctca

SEQ ID NO: 14431 - DNA, 20 bp, Artificial Sequence
  Target HLA Sequence complement
agagcgaggccggttctcac

SEQ ID NO: 14432 - DNA, 20 bp, Artificial Sequence
  Target HLA Sequence complement
gagcgaggccggttctcaca

SEQ ID NO: 14433 - DNA, 20 bp, Artificial Sequence
  Target HLA Sequence complement
agcgaggccggttctcacac

SEQ ID NO: 14434 - DNA, 20 bp, Artificial Sequence
  Target HLA Sequence complement
gcgaggccggttctcacacc

SEQ ID NO: 14435 - DNA, 20 bp, Artificial Sequence
  Target HLA Sequence complement
cgaggccggttctcacaccg

SEQ ID NO: 14436 - DNA, 20 bp, Artificial Sequence
  Target HLA Sequence complement
gaggccggttctcacaccgt

SEQ ID NO: 14437 - DNA, 20 bp, Artificial Sequence
  Target HLA Sequence complement
aggccggttctcacaccgtc

SEQ ID NO: 14438 - DNA, 20 bp, Artificial Sequence
  Target HLA Sequence complement
ggccggttctcacaccgtcc

SEQ ID NO: 14439 - DNA, 20 bp, Artificial Sequence
  Target HLA Sequence complement
gccggttctcacaccgtcca

SEQ ID NO: 14440 - DNA, 20 bp, Artificial Sequence
  Target HLA Sequence complement
ccggttctcacaccgtccag

SEQ ID NO: 14441 - DNA, 20 bp, Artificial Sequence
  Target HLA Sequence complement
cggttctcacaccgtccaga

SEQ ID NO: 14442 - DNA, 20 bp, Artificial Sequence
  Target HLA Sequence complement
ggttctcacaccgtccagag

SEQ ID NO: 14443 - DNA, 20 bp, Artificial Sequence
  Target HLA Sequence complement
gttctcacaccgtccagagg

SEQ ID NO: 14444 - DNA, 20 bp, Artificial Sequence
  Target HLA Sequence complement
ctcacaccgtccagaggatg

SEQ ID NO: 14445 - DNA, 20 bp, Artificial Sequence
  Target HLA Sequence complement
ccgtccagaggatgtatggc

SEQ ID NO: 14446 - DNA, 20 bp, Artificial Sequence
  Target HLA Sequence complement
ccagaggatgtatggctgcg

SEQ ID NO: 14447 - DNA, 20 bp, Artificial Sequence
  Target HLA Sequence complement
gaggatgtatggctgcgacg

SEQ ID NO: 14448 - DNA, 20 bp, Artificial Sequence
  Target HLA Sequence complement
ggatgtatggctgcgacgtg

SEQ ID NO: 14449 - DNA, 20 bp, Artificial Sequence
  Target HLA Sequence complement
gatgtatggctgcgacgtgg

SEQ ID NO: 14450 - DNA, 20 bp, Artificial Sequence
  Target HLA Sequence complement
atgtatggctgcgacgtggg

SEQ ID NO: 14451 - DNA, 20 bp, Artificial Sequence
  Target HLA Sequence complement
tgtatggctgcgacgtgggg

SEQ ID NO: 14452 - DNA, 20 bp, Artificial Sequence
  Target HLA Sequence complement
gtatggctgcgacgtggggt

SEQ ID NO: 14453 - DNA, 20 bp, Artificial Sequence
  Target HLA Sequence complement
tatggctgcgacgtggggtc

SEQ ID NO: 14454 - DNA, 20 bp, Artificial Sequence
  Target HLA Sequence complement
atggctgcgacgtggggtcg

SEQ ID NO: 14455 - DNA, 20 bp, Artificial Sequence
  Target HLA Sequence complement
tggctgcgacgtggggtcgg

SEQ ID NO: 14456 - DNA, 20 bp, Artificial Sequence
  Target HLA Sequence complement
ggctgcgacgtggggtcgga

SEQ ID NO: 14457 - DNA, 20 bp, Artificial Sequence
  Target HLA Sequence complement
gctgcgacgtggggtcggac

SEQ ID NO: 14458 - DNA, 20 bp, Artificial Sequence
  Target HLA Sequence complement
ctgcgacgtggggtcggact

SEQ ID NO: 14459 - DNA, 20 bp, Artificial Sequence
  Target HLA Sequence complement
tgcgacgtggggtcggactg

SEQ ID NO: 14460 - DNA, 20 bp, Artificial Sequence
  Target HLA Sequence complement
gcgacgtggggtcggactgg

SEQ ID NO: 14461 - DNA, 20 bp, Artificial Sequence
  Target HLA Sequence complement
cgacgtggggtcggactggc

SEQ ID NO: 14462 - DNA, 20 bp, Artificial Sequence
  Target HLA Sequence complement
gacgtggggtcggactggcg

SEQ ID NO: 14463 - DNA, 20 bp, Artificial Sequence
  Target HLA Sequence complement
acgtggggtcggactggcgc

SEQ ID NO: 14464 - DNA, 20 bp, Artificial Sequence
  Target HLA Sequence complement
cgtggggtcggactggcgct

SEQ ID NO: 14465 - DNA, 20 bp, Artificial Sequence
  Target HLA Sequence complement
gtggggtcggactggcgctt

SEQ ID NO: 14466 - DNA, 20 bp, Artificial Sequence
  Target HLA Sequence complement
tggggtcggactggcgcttc

SEQ ID NO: 14467 - DNA, 20 bp, Artificial Sequence
  Target HLA Sequence complement
ggggtcggactggcgcttcc

SEQ ID NO: 14468 - DNA, 20 bp, Artificial Sequence
  Target HLA Sequence complement
gggtcggactggcgcttcct

SEQ ID NO: 14469 - DNA, 20 bp, Artificial Sequence
  Target HLA Sequence complement
ggtcggactggcgcttcctc

SEQ ID NO: 14470 - DNA, 20 bp, Artificial Sequence
  Target HLA Sequence complement
gtcggactggcgcttcctcc

SEQ ID NO: 14471 - DNA, 20 bp, Artificial Sequence
  Target HLA Sequence complement
tcggactggcgcttcctccg

SEQ ID NO: 14472 - DNA, 20 bp, Artificial Sequence
  Target HLA Sequence complement
cggactggcgcttcctccgc

SEQ ID NO: 14473 - DNA, 20 bp, Artificial Sequence
  Target HLA Sequence complement
ggactggcgcttcctccgcg

SEQ ID NO: 14474 - DNA, 20 bp, Artificial Sequence
  Target HLA Sequence complement
gactggcgcttcctccgcgg

SEQ ID NO: 14475 - DNA, 20 bp, Artificial Sequence
  Target HLA Sequence complement
actggcgcttcctccgcggg

SEQ ID NO: 14476 - DNA, 20 bp, Artificial Sequence
  Target HLA Sequence complement
ctggcgcttcctccgcgggt

SEQ ID NO: 14477 - DNA, 20 bp, Artificial Sequence
  Target HLA Sequence complement
tggcgcttcctccgcgggta

SEQ ID NO: 14478 - DNA, 20 bp, Artificial Sequence
  Target HLA Sequence complement
ggcgcttcctccgcgggtac

SEQ ID NO: 14479 - DNA, 20 bp, Artificial Sequence
  Target HLA Sequence complement
gcgcttcctccgcgggtacc

SEQ ID NO: 14480 - DNA, 20 bp, Artificial Sequence
  Target HLA Sequence complement
cgcttcctccgcgggtacca

SEQ ID NO: 14481 - DNA, 20 bp, Artificial Sequence
  Target HLA Sequence complement
gcttcctccgcgggtaccac

SEQ ID NO: 14482 - DNA, 20 bp, Artificial Sequence
  Target HLA Sequence complement
cttcctccgcgggtaccacc

SEQ ID NO: 14483 - DNA, 20 bp, Artificial Sequence
  Target HLA Sequence complement
ttcctccgcgggtaccacca

SEQ ID NO: 14484 - DNA, 20 bp, Artificial Sequence
  Target HLA Sequence complement
tcctccgcgggtaccaccag

SEQ ID NO: 14485 - DNA, 20 bp, Artificial Sequence
  Target HLA Sequence complement
cctccgcgggtaccaccagt

SEQ ID NO: 14486 - DNA, 20 bp, Artificial Sequence
  Target HLA Sequence complement
ctccgcgggtaccaccagta

SEQ ID NO: 14487 - DNA, 20 bp, Artificial Sequence
  Target HLA Sequence complement
tccgcgggtaccaccagtac

SEQ ID NO: 14488 - DNA, 20 bp, Artificial Sequence
  Target HLA Sequence complement
ccgcgggtaccaccagtacg

SEQ ID NO: 14489 - DNA, 20 bp, Artificial Sequence
  Target HLA Sequence complement
cgcgggtaccaccagtacgc

SEQ ID NO: 14490 - DNA, 20 bp, Artificial Sequence
  Target HLA Sequence complement
gcgggtaccaccagtacgcc

SEQ ID NO: 14491 - DNA, 20 bp, Artificial Sequence
  Target HLA Sequence complement
cgggtaccaccagtacgcct

SEQ ID NO: 14492 - DNA, 20 bp, Artificial Sequence
  Target HLA Sequence complement
gggtaccaccagtacgccta

SEQ ID NO: 14493 - DNA, 20 bp, Artificial Sequence
  Target HLA Sequence complement
ggtaccaccagtacgcctac

SEQ ID NO: 14494 - DNA, 20 bp, Artificial Sequence
  Target HLA Sequence complement
gtaccaccagtacgcctacg

SEQ ID NO: 14495 - DNA, 20 bp, Artificial Sequence
  Target HLA Sequence complement
accaccagtacgcctacgac

SEQ ID NO: 14496 - DNA, 20 bp, Artificial Sequence
  Target HLA Sequence complement
ccaccagtacgcctacgacg

SEQ ID NO: 14497 - DNA, 20 bp, Artificial Sequence
  Target HLA Sequence complement
caccagtacgcctacgacgg

SEQ ID NO: 14498 - DNA, 20 bp, Artificial Sequence
  Target HLA Sequence complement
accagtacgcctacgacggc

SEQ ID NO: 14499 - DNA, 20 bp, Artificial Sequence
  Target HLA Sequence complement
ccagtacgcctacgacggca

SEQ ID NO: 14500 - DNA, 20 bp, Artificial Sequence
  Target HLA Sequence complement
cagtacgcctacgacggcaa

SEQ ID NO: 14501 - DNA, 20 bp, Artificial Sequence
  Target HLA Sequence complement
agtacgcctacgacggcaag

SEQ ID NO: 14502 - DNA, 20 bp, Artificial Sequence
  Target HLA Sequence complement
gtacgcctacgacggcaagg

SEQ ID NO: 14503 - DNA, 20 bp, Artificial Sequence
  Target HLA Sequence complement
tacgcctacgacggcaagga

SEQ ID NO: 14504 - DNA, 20 bp, Artificial Sequence
  Target HLA Sequence complement
acgcctacgacggcaaggat

SEQ ID NO: 14505 - DNA, 20 bp, Artificial Sequence
  Target HLA Sequence complement
cgcctacgacggcaaggatt

SEQ ID NO: 14506 - DNA, 20 bp, Artificial Sequence
  Target HLA Sequence complement
cggcaaggattacatcgccc

SEQ ID NO: 14507 - DNA, 20 bp, Artificial Sequence
  Target HLA Sequence complement
catcgccctgaaagaggacc

SEQ ID NO: 14508 - DNA, 20 bp, Artificial Sequence
  Target HLA Sequence complement
tcgccctgaaagaggacctg

SEQ ID NO: 14509 - DNA, 20 bp, Artificial Sequence
  Target HLA Sequence complement
cgccctgaaagaggacctgc

SEQ ID NO: 14510 - DNA, 20 bp, Artificial Sequence
  Target HLA Sequence complement
gccctgaaagaggacctgcg

SEQ ID NO: 14511 - DNA, 20 bp, Artificial Sequence
  Target HLA Sequence complement
ccctgaaagaggacctgcgc

SEQ ID NO: 14512 - DNA, 20 bp, Artificial Sequence
  Target HLA Sequence complement
cctgaaagaggacctgcgct

SEQ ID NO: 14513 - DNA, 20 bp, Artificial Sequence
  Target HLA Sequence complement
ctgaaagaggacctgcgctc

SEQ ID NO: 14514 - DNA, 20 bp, Artificial Sequence
  Target HLA Sequence complement
aagaggacctgcgctcttgg

SEQ ID NO: 14515 - DNA, 20 bp, Artificial Sequence
  Target HLA Sequence complement
agaggacctgcgctcttgga

SEQ ID NO: 14516 - DNA, 20 bp, Artificial Sequence
  Target HLA Sequence complement
gaggacctgcgctcttggac

SEQ ID NO: 14517 - DNA, 20 bp, Artificial Sequence
  Target HLA Sequence complement
aggacctgcgctcttggacc

SEQ ID NO: 14518 - DNA, 20 bp, Artificial Sequence
  Target HLA Sequence complement
ggacctgcgctcttggaccg

SEQ ID NO: 14519 - DNA, 20 bp, Artificial Sequence
  Target HLA Sequence complement
gacctgcgctcttggaccgc

SEQ ID NO: 14520 - DNA, 20 bp, Artificial Sequence
  Target HLA Sequence complement
acctgcgctcttggaccgcg

SEQ ID NO: 14521 - DNA, 20 bp, Artificial Sequence
  Target HLA Sequence complement
cctgcgctcttggaccgcgg

SEQ ID NO: 14522 - DNA, 20 bp, Artificial Sequence
  Target HLA Sequence complement
ctgcgctcttggaccgcggc

SEQ ID NO: 14523 - DNA, 20 bp, Artificial Sequence
  Target HLA Sequence complement
tgcgctcttggaccgcggcg

SEQ ID NO: 14524 - DNA, 20 bp, Artificial Sequence
  Target HLA Sequence complement
gcgctcttggaccgcggcgg

SEQ ID NO: 14525 - DNA, 20 bp, Artificial Sequence
  Target HLA Sequence complement
cgctcttggaccgcggcgga

SEQ ID NO: 14526 - DNA, 20 bp, Artificial Sequence
  Target HLA Sequence complement
gctcttggaccgcggcggac

SEQ ID NO: 14527 - DNA, 20 bp, Artificial Sequence
  Target HLA Sequence complement
ctcttggaccgcggcggaca

SEQ ID NO: 14528 - DNA, 20 bp, Artificial Sequence
  Target HLA Sequence complement
tcttggaccgcggcggacat

SEQ ID NO: 14529 - DNA, 20 bp, Artificial Sequence
  Target HLA Sequence complement
cttggaccgcggcggacatg

SEQ ID NO: 14530 - DNA, 20 bp, Artificial Sequence
  Target HLA Sequence complement
ttggaccgcggcggacatgg

SEQ ID NO: 14531 - DNA, 20 bp, Artificial Sequence
  Target HLA Sequence complement
tggaccgcggcggacatggc

SEQ ID NO: 14532 - DNA, 20 bp, Artificial Sequence
  Target HLA Sequence complement
ggaccgcggcggacatggca

SEQ ID NO: 14533 - DNA, 20 bp, Artificial Sequence
  Target HLA Sequence complement
gaccgcggcggacatggcag

SEQ ID NO: 14534 - DNA, 20 bp, Artificial Sequence
  Target HLA Sequence complement
accgcggcggacatggcagc

SEQ ID NO: 14535 - DNA, 20 bp, Artificial Sequence
  Target HLA Sequence complement
ccgcggcggacatggcagct

SEQ ID NO: 14536 - DNA, 20 bp, Artificial Sequence
  Target HLA Sequence complement
cgcggcggacatggcagctc

SEQ ID NO: 14537 - DNA, 20 bp, Artificial Sequence
  Target HLA Sequence complement
gcggcggacatggcagctca

SEQ ID NO: 14538 - DNA, 20 bp, Artificial Sequence
  Target HLA Sequence complement
cggcggacatggcagctcag

SEQ ID NO: 14539 - DNA, 20 bp, Artificial Sequence
  Target HLA Sequence complement
ggcggacatggcagctcaga

SEQ ID NO: 14540 - DNA, 20 bp, Artificial Sequence
  Target HLA Sequence complement
gcggacatggcagctcagac

SEQ ID NO: 14541 - DNA, 20 bp, Artificial Sequence
  Target HLA Sequence complement
cggacatggcagctcagacc

SEQ ID NO: 14542 - DNA, 20 bp, Artificial Sequence
  Target HLA Sequence complement
ggacatggcagctcagacca

SEQ ID NO: 14543 - DNA, 20 bp, Artificial Sequence
  Target HLA Sequence complement
gacatggcagctcagaccac

SEQ ID NO: 14544 - DNA, 20 bp, Artificial Sequence
  Target HLA Sequence complement
acatggcagctcagaccacc

SEQ ID NO: 14545 - DNA, 20 bp, Artificial Sequence
  Target HLA Sequence complement
catggcagctcagaccacca

SEQ ID NO: 14546 - DNA, 20 bp, Artificial Sequence
  Target HLA Sequence complement
tggcagctcagaccaccaag

SEQ ID NO: 14547 - DNA, 20 bp, Artificial Sequence
  Target HLA Sequence complement
ggcagctcagaccaccaagc

SEQ ID NO: 14548 - DNA, 20 bp, Artificial Sequence
  Target HLA Sequence complement
gcagctcagaccaccaagca

SEQ ID NO: 14549 - DNA, 20 bp, Artificial Sequence
  Target HLA Sequence complement
cagctcagaccaccaagcac

SEQ ID NO: 14550 - DNA, 20 bp, Artificial Sequence
  Target HLA Sequence complement
gaccaccaagcacaagtggg

SEQ ID NO: 14551 - DNA, 20 bp, Artificial Sequence
  Target HLA Sequence complement
ccaccaagcacaagtgggag

SEQ ID NO: 14552 - DNA, 20 bp, Artificial Sequence
  Target HLA Sequence complement
caccaagcacaagtgggagg

SEQ ID NO: 14553 - DNA, 20 bp, Artificial Sequence
  Target HLA Sequence complement
accaagcacaagtgggaggc

SEQ ID NO: 14554 - DNA, 20 bp, Artificial Sequence
  Target HLA Sequence complement
ccaagcacaagtgggaggcg

SEQ ID NO: 14555 - DNA, 20 bp, Artificial Sequence
  Target HLA Sequence complement
caagcacaagtgggaggcgg

SEQ ID NO: 14556 - DNA, 20 bp, Artificial Sequence
  Target HLA Sequence complement
aagcacaagtgggaggcggc

SEQ ID NO: 14557 - DNA, 20 bp, Artificial Sequence
  Target HLA Sequence complement
agcacaagtgggaggcggcc

SEQ ID NO: 14558 - DNA, 20 bp, Artificial Sequence
  Target HLA Sequence complement
gcacaagtgggaggcggccc

SEQ ID NO: 14559 - DNA, 20 bp, Artificial Sequence
  Target HLA Sequence complement
cacaagtgggaggcggccca

SEQ ID NO: 14560 - DNA, 20 bp, Artificial Sequence
  Target HLA Sequence complement
acaagtgggaggcggcccat

SEQ ID NO: 14561 - DNA, 20 bp, Artificial Sequence
  Target HLA Sequence complement
caagtgggaggcggcccatg

SEQ ID NO: 14562 - DNA, 20 bp, Artificial Sequence
  Target HLA Sequence complement
aagtgggaggcggcccatgt

SEQ ID NO: 14563 - DNA, 20 bp, Artificial Sequence
  Target HLA Sequence complement
agtgggaggcggcccatgtg

SEQ ID NO: 14564 - DNA, 20 bp, Artificial Sequence
  Target HLA Sequence complement
gtgggaggcggcccatgtgg

SEQ ID NO: 14565 - DNA, 20 bp, Artificial Sequence
  Target HLA Sequence complement
tgggaggcggcccatgtggc

SEQ ID NO: 14566 - DNA, 20 bp, Artificial Sequence
  Target HLA Sequence complement
gggaggcggcccatgtggcg

SEQ ID NO: 14567 - DNA, 20 bp, Artificial Sequence
  Target HLA Sequence complement
ggaggcggcccatgtggcgg

SEQ ID NO: 14568 - DNA, 20 bp, Artificial Sequence
  Target HLA Sequence complement
gaggcggcccatgtggcgga

SEQ ID NO: 14569 - DNA, 20 bp, Artificial Sequence
  Target HLA Sequence complement
aggcggcccatgtggcggag

SEQ ID NO: 14570 - DNA, 20 bp, Artificial Sequence
  Target HLA Sequence complement
ggcggcccatgtggcggagc

SEQ ID NO: 14571 - DNA, 20 bp, Artificial Sequence
  Target HLA Sequence complement
gcggcccatgtggcggagca

SEQ ID NO: 14572 - DNA, 20 bp, Artificial Sequence
  Target HLA Sequence complement
cggcccatgtggcggagcag

SEQ ID NO: 14573 - DNA, 20 bp, Artificial Sequence
  Target HLA Sequence complement
ggcccatgtggcggagcagt

SEQ ID NO: 14574 - DNA, 20 bp, Artificial Sequence
  Target HLA Sequence complement
gcccatgtggcggagcagtt

SEQ ID NO: 14575 - DNA, 20 bp, Artificial Sequence
  Target HLA Sequence complement
cccatgtggcggagcagttg

SEQ ID NO: 14576 - DNA, 20 bp, Artificial Sequence
  Target HLA Sequence complement
ccatgtggcggagcagttga

SEQ ID NO: 14577 - DNA, 20 bp, Artificial Sequence
  Target HLA Sequence complement
catgtggcggagcagttgag

SEQ ID NO: 14578 - DNA, 20 bp, Artificial Sequence
  Target HLA Sequence complement
tgtggcggagcagttgagag

SEQ ID NO: 14579 - DNA, 20 bp, Artificial Sequence
  Target HLA Sequence complement
gtggcggagcagttgagagc

SEQ ID NO: 14580 - DNA, 20 bp, Artificial Sequence
  Target HLA Sequence complement
tggcggagcagttgagagcc

SEQ ID NO: 14581 - DNA, 20 bp, Artificial Sequence
  Target HLA Sequence complement
ggcggagcagttgagagcct

SEQ ID NO: 14582 - DNA, 20 bp, Artificial Sequence
  Target HLA Sequence complement
gcggagcagttgagagccta

SEQ ID NO: 14583 - DNA, 20 bp, Artificial Sequence
  Target HLA Sequence complement
cggagcagttgagagcctac

SEQ ID NO: 14584 - DNA, 20 bp, Artificial Sequence
  Target HLA Sequence complement
ggagcagttgagagcctacc

SEQ ID NO: 14585 - DNA, 20 bp, Artificial Sequence
  Target HLA Sequence complement
gcagttgagagcctacctgg

SEQ ID NO: 14586 - DNA, 20 bp, Artificial Sequence
  Target HLA Sequence complement
gttgagagcctacctggagg

SEQ ID NO: 14587 - DNA, 20 bp, Artificial Sequence
  Target HLA Sequence complement
ttgagagcctacctggaggg

SEQ ID NO: 14588 - DNA, 20 bp, Artificial Sequence
  Target HLA Sequence complement
tgagagcctacctggagggc

SEQ ID NO: 14589 - DNA, 20 bp, Artificial Sequence
  Target HLA Sequence complement
gagagcctacctggagggca

SEQ ID NO: 14590 - DNA, 20 bp, Artificial Sequence
  Target HLA Sequence complement
agagcctacctggagggcac

SEQ ID NO: 14591 - DNA, 20 bp, Artificial Sequence
  Target HLA Sequence complement
gagcctacctggagggcacg

SEQ ID NO: 14592 - DNA, 20 bp, Artificial Sequence
  Target HLA Sequence complement
agcctacctggagggcacgt

SEQ ID NO: 14593 - DNA, 20 bp, Artificial Sequence
  Target HLA Sequence complement
gcctacctggagggcacgtg

SEQ ID NO: 14594 - DNA, 20 bp, Artificial Sequence
  Target HLA Sequence complement
cctacctggagggcacgtgc

SEQ ID NO: 14595 - DNA, 20 bp, Artificial Sequence
  Target HLA Sequence complement
ctacctggagggcacgtgcg

SEQ ID NO: 14596 - DNA, 20 bp, Artificial Sequence
  Target HLA Sequence complement
tacctggagggcacgtgcgt

SEQ ID NO: 14597 - DNA, 20 bp, Artificial Sequence
  Target HLA Sequence complement
acctggagggcacgtgcgtg

SEQ ID NO: 14598 - DNA, 20 bp, Artificial Sequence
  Target HLA Sequence complement
cctggagggcacgtgcgtgg

SEQ ID NO: 14599 - DNA, 20 bp, Artificial Sequence
  Target HLA Sequence complement
ctggagggcacgtgcgtgga

SEQ ID NO: 14600 - DNA, 20 bp, Artificial Sequence
  Target HLA Sequence complement
tggagggcacgtgcgtggag

SEQ ID NO: 14601 - DNA, 20 bp, Artificial Sequence
  Target HLA Sequence complement
ggagggcacgtgcgtggagt

SEQ ID NO: 14602 - DNA, 20 bp, Artificial Sequence
  Target HLA Sequence complement
gagggcacgtgcgtggagtg

SEQ ID NO: 14603 - DNA, 20 bp, Artificial Sequence
  Target HLA Sequence complement
agggcacgtgcgtggagtgg

SEQ ID NO: 14604 - DNA, 20 bp, Artificial Sequence
  Target HLA Sequence complement
gggcacgtgcgtggagtggc

SEQ ID NO: 14605 - DNA, 20 bp, Artificial Sequence
  Target HLA Sequence complement
ggcacgtgcgtggagtggct

SEQ ID NO: 14606 - DNA, 20 bp, Artificial Sequence
  Target HLA Sequence complement
gcacgtgcgtggagtggctc

SEQ ID NO: 14607 - DNA, 20 bp, Artificial Sequence
  Target HLA Sequence complement
cacgtgcgtggagtggctcc

SEQ ID NO: 14608 - DNA, 20 bp, Artificial Sequence
  Target HLA Sequence complement
acgtgcgtggagtggctccg

SEQ ID NO: 14609 - DNA, 20 bp, Artificial Sequence
  Target HLA Sequence complement
cgtgcgtggagtggctccgc

SEQ ID NO: 14610 - DNA, 20 bp, Artificial Sequence
  Target HLA Sequence complement
gtgcgtggagtggctccgca

SEQ ID NO: 14611 - DNA, 20 bp, Artificial Sequence
  Target HLA Sequence complement
tgcgtggagtggctccgcag

SEQ ID NO: 14612 - DNA, 20 bp, Artificial Sequence
  Target HLA Sequence complement
gcgtggagtggctccgcaga

SEQ ID NO: 14613 - DNA, 20 bp, Artificial Sequence
  Target HLA Sequence complement
cgtggagtggctccgcagat

SEQ ID NO: 14614 - DNA, 20 bp, Artificial Sequence
  Target HLA Sequence complement
gtggagtggctccgcagata

SEQ ID NO: 14615 - DNA, 20 bp, Artificial Sequence
  Target HLA Sequence complement
tggagtggctccgcagatac

SEQ ID NO: 14616 - DNA, 20 bp, Artificial Sequence
  Target HLA Sequence complement
ggagtggctccgcagatacc

SEQ ID NO: 14617 - DNA, 20 bp, Artificial Sequence
  Target HLA Sequence complement
gagtggctccgcagatacct

SEQ ID NO: 14618 - DNA, 20 bp, Artificial Sequence
  Target HLA Sequence complement
agtggctccgcagatacctg

SEQ ID NO: 14619 - DNA, 20 bp, Artificial Sequence
  Target HLA Sequence complement
gtggctccgcagatacctgg

SEQ ID NO: 14620 - DNA, 20 bp, Artificial Sequence
  Target HLA Sequence complement
tggctccgcagatacctgga

SEQ ID NO: 14621 - DNA, 20 bp, Artificial Sequence
  Target HLA Sequence complement
ggctccgcagatacctggag

SEQ ID NO: 14622 - DNA, 20 bp, Artificial Sequence
  Target HLA Sequence complement
gctccgcagatacctggaga

SEQ ID NO: 14623 - DNA, 20 bp, Artificial Sequence
  Target HLA Sequence complement
ccgcagatacctggagaacg

SEQ ID NO: 14624 - DNA, 20 bp, Artificial Sequence
  Target HLA Sequence complement
cgcagatacctggagaacgg

SEQ ID NO: 14625 - DNA, 20 bp, Artificial Sequence
  Target HLA Sequence complement
gcagatacctggagaacggg

SEQ ID NO: 14626 - DNA, 20 bp, Artificial Sequence
  Target HLA Sequence complement
acctggagaacgggaaggag

SEQ ID NO: 14627 - DNA, 20 bp, Artificial Sequence
  Target HLA Sequence complement
cctggagaacgggaaggaga

SEQ ID NO: 14628 - DNA, 20 bp, Artificial Sequence
  Target HLA Sequence complement
ctggagaacgggaaggagac

SEQ ID NO: 14629 - DNA, 20 bp, Artificial Sequence
  Target HLA Sequence complement
tggagaacgggaaggagacg

SEQ ID NO: 14630 - DNA, 20 bp, Artificial Sequence
  Target HLA Sequence complement
ggagaacgggaaggagacgc

SEQ ID NO: 14631 - DNA, 20 bp, Artificial Sequence
  Target HLA Sequence complement
gagaacgggaaggagacgct

SEQ ID NO: 14632 - DNA, 20 bp, Artificial Sequence
  Target HLA Sequence complement
agaacgggaaggagacgctg

SEQ ID NO: 14633 - DNA, 20 bp, Artificial Sequence
  Target HLA Sequence complement
gaacgggaaggagacgctgc

SEQ ID NO: 14634 - DNA, 20 bp, Artificial Sequence
  Target HLA Sequence complement
aacgggaaggagacgctgca

SEQ ID NO: 14635 - DNA, 20 bp, Artificial Sequence
  Target HLA Sequence complement
acgggaaggagacgctgcag

SEQ ID NO: 14636 - DNA, 20 bp, Artificial Sequence
  Target HLA Sequence complement
cgggaaggagacgctgcagc

SEQ ID NO: 14637 - DNA, 20 bp, Artificial Sequence
  Target HLA Sequence complement
gggaaggagacgctgcagcg

SEQ ID NO: 14638 - DNA, 20 bp, Artificial Sequence
  Target HLA Sequence complement
ggaaggagacgctgcagcgc

SEQ ID NO: 14639 - DNA, 20 bp, Artificial Sequence
  Target HLA Sequence complement
gaaggagacgctgcagcgca

SEQ ID NO: 14640 - DNA, 20 bp, Artificial Sequence
  Target HLA Sequence complement
aaggagacgctgcagcgcac

SEQ ID NO: 14641 - DNA, 20 bp, Artificial Sequence
  Target HLA Sequence complement
aggagacgctgcagcgcacg

SEQ ID NO: 14642 - DNA, 20 bp, Artificial Sequence
  Target HLA Sequence complement
ggagacgctgcagcgcacgg

SEQ ID NO: 14643 - DNA, 20 bp, Artificial Sequence
  Target HLA Sequence complement
gagacgctgcagcgcacgga

SEQ ID NO: 14644 - DNA, 20 bp, Artificial Sequence
  Target HLA Sequence complement
agacgctgcagcgcacggac

SEQ ID NO: 14645 - DNA, 20 bp, Artificial Sequence
  Target HLA Sequence complement
gacgctgcagcgcacggacg

SEQ ID NO: 14646 - DNA, 20 bp, Artificial Sequence
  Target HLA Sequence complement
acgctgcagcgcacggacgc

SEQ ID NO: 14647 - DNA, 20 bp, Artificial Sequence
  Target HLA Sequence complement
cgctgcagcgcacggacgcc

SEQ ID NO: 14648 - DNA, 20 bp, Artificial Sequence
  Target HLA Sequence complement
gctgcagcgcacggacgccc

SEQ ID NO: 14649 - DNA, 20 bp, Artificial Sequence
  Target HLA Sequence complement
ctgcagcgcacggacgcccc

SEQ ID NO: 14650 - DNA, 20 bp, Artificial Sequence
  Target HLA Sequence complement
tgcagcgcacggacgccccc

SEQ ID NO: 14651 - DNA, 20 bp, Artificial Sequence
  Target HLA Sequence complement
gcagcgcacggacgccccca

SEQ ID NO: 14652 - DNA, 20 bp, Artificial Sequence
  Target HLA Sequence complement
cagcgcacggacgcccccaa

SEQ ID NO: 14653 - DNA, 20 bp, Artificial Sequence
  Target HLA Sequence complement
agcgcacggacgcccccaaa

SEQ ID NO: 14654 - DNA, 20 bp, Artificial Sequence
  Target HLA Sequence complement
gcgcacggacgcccccaaaa

SEQ ID NO: 14655 - DNA, 20 bp, Artificial Sequence
  Target HLA Sequence complement
cgcacggacgcccccaaaac

SEQ ID NO: 14656 - DNA, 20 bp, Artificial Sequence
  Target HLA Sequence complement
gcacggacgcccccaaaacg

SEQ ID NO: 14657 - DNA, 20 bp, Artificial Sequence
  Target HLA Sequence complement
cacggacgcccccaaaacgc

SEQ ID NO: 14658 - DNA, 20 bp, Artificial Sequence
  Target HLA Sequence complement
acggacgcccccaaaacgca

SEQ ID NO: 14659 - DNA, 20 bp, Artificial Sequence
  Target HLA Sequence complement
cggacgcccccaaaacgcat

SEQ ID NO: 14660 - DNA, 20 bp, Artificial Sequence
  Target HLA Sequence complement
ggacgcccccaaaacgcata

SEQ ID NO: 14661 - DNA, 20 bp, Artificial Sequence
  Target HLA Sequence complement
gactcaccacgctgtctctg

SEQ ID NO: 14662 - DNA, 20 bp, Artificial Sequence
  Target HLA Sequence complement
ctcaccacgctgtctctgac

SEQ ID NO: 14663 - DNA, 20 bp, Artificial Sequence
  Target HLA Sequence complement
tcaccacgctgtctctgacc

SEQ ID NO: 14664 - DNA, 20 bp, Artificial Sequence
  Target HLA Sequence complement
caccacgctgtctctgacca

SEQ ID NO: 14665 - DNA, 20 bp, Artificial Sequence
  Target HLA Sequence complement
ccacgctgtctctgaccatg

SEQ ID NO: 14666 - DNA, 20 bp, Artificial Sequence
  Target HLA Sequence complement
ctctgaccatgaagccaccc

SEQ ID NO: 14667 - DNA, 20 bp, Artificial Sequence
  Target HLA Sequence complement
ctgaccatgaagccaccctg

SEQ ID NO: 14668 - DNA, 20 bp, Artificial Sequence
  Target HLA Sequence complement
gaccatgaagccaccctgag

SEQ ID NO: 14669 - DNA, 20 bp, Artificial Sequence
  Target HLA Sequence complement
accatgaagccaccctgagg

SEQ ID NO: 14670 - DNA, 20 bp, Artificial Sequence
  Target HLA Sequence complement
ccatgaagccaccctgaggt

SEQ ID NO: 14671 - DNA, 20 bp, Artificial Sequence
  Target HLA Sequence complement
catgaagccaccctgaggtg

SEQ ID NO: 14672 - DNA, 20 bp, Artificial Sequence
  Target HLA Sequence complement
atgaagccaccctgaggtgc

SEQ ID NO: 14673 - DNA, 20 bp, Artificial Sequence
  Target HLA Sequence complement
tgaagccaccctgaggtgct

SEQ ID NO: 14674 - DNA, 20 bp, Artificial Sequence
  Target HLA Sequence complement
gaagccaccctgaggtgctg

SEQ ID NO: 14675 - DNA, 20 bp, Artificial Sequence
  Target HLA Sequence complement
aagccaccctgaggtgctgg

SEQ ID NO: 14676 - DNA, 20 bp, Artificial Sequence
  Target HLA Sequence complement
agccaccctgaggtgctggg

SEQ ID NO: 14677 - DNA, 20 bp, Artificial Sequence
  Target HLA Sequence complement
gccaccctgaggtgctgggc

SEQ ID NO: 14678 - DNA, 20 bp, Artificial Sequence
  Target HLA Sequence complement
ccaccctgaggtgctgggcc

SEQ ID NO: 14679 - DNA, 20 bp, Artificial Sequence
  Target HLA Sequence complement
caccctgaggtgctgggccc

SEQ ID NO: 14680 - DNA, 20 bp, Artificial Sequence
  Target HLA Sequence complement
accctgaggtgctgggccct

SEQ ID NO: 14681 - DNA, 20 bp, Artificial Sequence
  Target HLA Sequence complement
ccctgaggtgctgggccctg

SEQ ID NO: 14682 - DNA, 20 bp, Artificial Sequence
  Target HLA Sequence complement
cctgaggtgctgggccctga

SEQ ID NO: 14683 - DNA, 20 bp, Artificial Sequence
  Target HLA Sequence complement
ctgaggtgctgggccctgag

SEQ ID NO: 14684 - DNA, 20 bp, Artificial Sequence
  Target HLA Sequence complement
tgaggtgctgggccctgagc

SEQ ID NO: 14685 - DNA, 20 bp, Artificial Sequence
  Target HLA Sequence complement
gaggtgctgggccctgagct

SEQ ID NO: 14686 - DNA, 20 bp, Artificial Sequence
  Target HLA Sequence complement
aggtgctgggccctgagctt

SEQ ID NO: 14687 - DNA, 20 bp, Artificial Sequence
  Target HLA Sequence complement
ggtgctgggccctgagcttc

SEQ ID NO: 14688 - DNA, 20 bp, Artificial Sequence
  Target HLA Sequence complement
gtgctgggccctgagcttct

SEQ ID NO: 14689 - DNA, 20 bp, Artificial Sequence
  Target HLA Sequence complement
tgctgggccctgagcttcta

SEQ ID NO: 14690 - DNA, 20 bp, Artificial Sequence
  Target HLA Sequence complement
gctgggccctgagcttctac

SEQ ID NO: 14691 - DNA, 20 bp, Artificial Sequence
  Target HLA Sequence complement
ctgggccctgagcttctacc

SEQ ID NO: 14692 - DNA, 20 bp, Artificial Sequence
  Target HLA Sequence complement
tgggccctgagcttctaccc

SEQ ID NO: 14693 - DNA, 20 bp, Artificial Sequence
  Target HLA Sequence complement
gggccctgagcttctaccct

SEQ ID NO: 14694 - DNA, 20 bp, Artificial Sequence
  Target HLA Sequence complement
ggccctgagcttctaccctg

SEQ ID NO: 14695 - DNA, 20 bp, Artificial Sequence
  Target HLA Sequence complement
gccctgagcttctaccctgc

SEQ ID NO: 14696 - DNA, 20 bp, Artificial Sequence
  Target HLA Sequence complement
ccctgagcttctaccctgcg

SEQ ID NO: 14697 - DNA, 20 bp, Artificial Sequence
  Target HLA Sequence complement
cctgagcttctaccctgcgg

SEQ ID NO: 14698 - DNA, 20 bp, Artificial Sequence
  Target HLA Sequence complement
ctgagcttctaccctgcgga

SEQ ID NO: 14699 - DNA, 20 bp, Artificial Sequence
  Target HLA Sequence complement
tgagcttctaccctgcggag

SEQ ID NO: 14700 - DNA, 20 bp, Artificial Sequence
  Target HLA Sequence complement
gagcttctaccctgcggaga

SEQ ID NO: 14701 - DNA, 20 bp, Artificial Sequence
  Target HLA Sequence complement
gcttctaccctgcggagatc

SEQ ID NO: 14702 - DNA, 20 bp, Artificial Sequence
  Target HLA Sequence complement
ctaccctgcggagatcacac

SEQ ID NO: 14703 - DNA, 20 bp, Artificial Sequence
  Target HLA Sequence complement
accctgcggagatcacactg

SEQ ID NO: 14704 - DNA, 20 bp, Artificial Sequence
  Target HLA Sequence complement
ccctgcggagatcacactga

SEQ ID NO: 14705 - DNA, 20 bp, Artificial Sequence
  Target HLA Sequence complement
cctgcggagatcacactgac

SEQ ID NO: 14706 - DNA, 20 bp, Artificial Sequence
  Target HLA Sequence complement
ctgcggagatcacactgacc

SEQ ID NO: 14707 - DNA, 20 bp, Artificial Sequence
  Target HLA Sequence complement
gcggagatcacactgacctg

SEQ ID NO: 14708 - DNA, 20 bp, Artificial Sequence
  Target HLA Sequence complement
cggagatcacactgacctgg

SEQ ID NO: 14709 - DNA, 20 bp, Artificial Sequence
  Target HLA Sequence complement
ggagatcacactgacctggc

SEQ ID NO: 14710 - DNA, 20 bp, Artificial Sequence
  Target HLA Sequence complement
gatcacactgacctggcagc

SEQ ID NO: 14711 - DNA, 20 bp, Artificial Sequence
  Target HLA Sequence complement
atcacactgacctggcagcg

SEQ ID NO: 14712 - DNA, 20 bp, Artificial Sequence
  Target HLA Sequence complement
tcacactgacctggcagcgg

SEQ ID NO: 14713 - DNA, 20 bp, Artificial Sequence
  Target HLA Sequence complement
cacactgacctggcagcggg

SEQ ID NO: 14714 - DNA, 20 bp, Artificial Sequence
  Target HLA Sequence complement
acactgacctggcagcggga

SEQ ID NO: 14715 - DNA, 20 bp, Artificial Sequence
  Target HLA Sequence complement
cactgacctggcagcgggat

SEQ ID NO: 14716 - DNA, 20 bp, Artificial Sequence
  Target HLA Sequence complement
actgacctggcagcgggatg

SEQ ID NO: 14717 - DNA, 20 bp, Artificial Sequence
  Target HLA Sequence complement
ctgacctggcagcgggatgg

SEQ ID NO: 14718 - DNA, 20 bp, Artificial Sequence
  Target HLA Sequence complement
tgacctggcagcgggatggg

SEQ ID NO: 14719 - DNA, 20 bp, Artificial Sequence
  Target HLA Sequence complement
gacctggcagcgggatgggg

SEQ ID NO: 14720 - DNA, 20 bp, Artificial Sequence
  Target HLA Sequence complement
acctggcagcgggatgggga

SEQ ID NO: 14721 - DNA, 20 bp, Artificial Sequence
  Target HLA Sequence complement
cctggcagcgggatggggag

SEQ ID NO: 14722 - DNA, 20 bp, Artificial Sequence
  Target HLA Sequence complement
ctggcagcgggatggggagg

SEQ ID NO: 14723 - DNA, 20 bp, Artificial Sequence
  Target HLA Sequence complement
tggcagcgggatggggagga

SEQ ID NO: 14724 - DNA, 20 bp, Artificial Sequence
  Target HLA Sequence complement
ggcagcgggatggggaggac

SEQ ID NO: 14725 - DNA, 20 bp, Artificial Sequence
  Target HLA Sequence complement
gcagcgggatggggaggacc

SEQ ID NO: 14726 - DNA, 20 bp, Artificial Sequence
  Target HLA Sequence complement
cagcgggatggggaggacca

SEQ ID NO: 14727 - DNA, 20 bp, Artificial Sequence
  Target HLA Sequence complement
agcgggatggggaggaccag

SEQ ID NO: 14728 - DNA, 20 bp, Artificial Sequence
  Target HLA Sequence complement
gcgggatggggaggaccaga

SEQ ID NO: 14729 - DNA, 20 bp, Artificial Sequence
  Target HLA Sequence complement
cgggatggggaggaccagac

SEQ ID NO: 14730 - DNA, 20 bp, Artificial Sequence
  Target HLA Sequence complement
gggatggggaggaccagacc

SEQ ID NO: 14731 - DNA, 20 bp, Artificial Sequence
  Target HLA Sequence complement
ggatggggaggaccagaccc

SEQ ID NO: 14732 - DNA, 20 bp, Artificial Sequence
  Target HLA Sequence complement
gatggggaggaccagaccca

SEQ ID NO: 14733 - DNA, 20 bp, Artificial Sequence
  Target HLA Sequence complement
atggggaggaccagacccag

SEQ ID NO: 14734 - DNA, 20 bp, Artificial Sequence
  Target HLA Sequence complement
tggggaggaccagacccagg

SEQ ID NO: 14735 - DNA, 20 bp, Artificial Sequence
  Target HLA Sequence complement
ggggaggaccagacccagga

SEQ ID NO: 14736 - DNA, 20 bp, Artificial Sequence
  Target HLA Sequence complement
gggaggaccagacccaggac

SEQ ID NO: 14737 - DNA, 20 bp, Artificial Sequence
  Target HLA Sequence complement
ggaggaccagacccaggaca

SEQ ID NO: 14738 - DNA, 20 bp, Artificial Sequence
  Target HLA Sequence complement
gaggaccagacccaggacac

SEQ ID NO: 14739 - DNA, 20 bp, Artificial Sequence
  Target HLA Sequence complement
aggaccagacccaggacacg

SEQ ID NO: 14740 - DNA, 20 bp, Artificial Sequence
  Target HLA Sequence complement
ggaccagacccaggacacgg

SEQ ID NO: 14741 - DNA, 20 bp, Artificial Sequence
  Target HLA Sequence complement
gaccagacccaggacacgga

SEQ ID NO: 14742 - DNA, 20 bp, Artificial Sequence
  Target HLA Sequence complement
accagacccaggacacggag

SEQ ID NO: 14743 - DNA, 20 bp, Artificial Sequence
  Target HLA Sequence complement
ccagacccaggacacggagc

SEQ ID NO: 14744 - DNA, 20 bp, Artificial Sequence
  Target HLA Sequence complement
cagacccaggacacggagct

SEQ ID NO: 14745 - DNA, 20 bp, Artificial Sequence
  Target HLA Sequence complement
agacccaggacacggagctc

SEQ ID NO: 14746 - DNA, 20 bp, Artificial Sequence
  Target HLA Sequence complement
gacccaggacacggagctcg

SEQ ID NO: 14747 - DNA, 20 bp, Artificial Sequence
  Target HLA Sequence complement
acccaggacacggagctcgt

SEQ ID NO: 14748 - DNA, 20 bp, Artificial Sequence
  Target HLA Sequence complement
cccaggacacggagctcgtg

SEQ ID NO: 14749 - DNA, 20 bp, Artificial Sequence
  Target HLA Sequence complement
ccaggacacggagctcgtgg

SEQ ID NO: 14750 - DNA, 20 bp, Artificial Sequence
  Target HLA Sequence complement
caggacacggagctcgtgga

SEQ ID NO: 14751 - DNA, 20 bp, Artificial Sequence
  Target HLA Sequence complement
aggacacggagctcgtggag

SEQ ID NO: 14752 - DNA, 20 bp, Artificial Sequence
  Target HLA Sequence complement
ggacacggagctcgtggaga

SEQ ID NO: 14753 - DNA, 20 bp, Artificial Sequence
  Target HLA Sequence complement
gacacggagctcgtggagac

SEQ ID NO: 14754 - DNA, 20 bp, Artificial Sequence
  Target HLA Sequence complement
acacggagctcgtggagacc

SEQ ID NO: 14755 - DNA, 20 bp, Artificial Sequence
  Target HLA Sequence complement
cacggagctcgtggagacca

SEQ ID NO: 14756 - DNA, 20 bp, Artificial Sequence
  Target HLA Sequence complement
acggagctcgtggagaccag

SEQ ID NO: 14757 - DNA, 20 bp, Artificial Sequence
  Target HLA Sequence complement
cggagctcgtggagaccagg

SEQ ID NO: 14758 - DNA, 20 bp, Artificial Sequence
  Target HLA Sequence complement
ggagctcgtggagaccaggc

SEQ ID NO: 14759 - DNA, 20 bp, Artificial Sequence
  Target HLA Sequence complement
gagctcgtggagaccaggcc

SEQ ID NO: 14760 - DNA, 20 bp, Artificial Sequence
  Target HLA Sequence complement
agctcgtggagaccaggcct

SEQ ID NO: 14761 - DNA, 20 bp, Artificial Sequence
  Target HLA Sequence complement
gctcgtggagaccaggcctg

SEQ ID NO: 14762 - DNA, 20 bp, Artificial Sequence
  Target HLA Sequence complement
ctcgtggagaccaggcctgc

SEQ ID NO: 14763 - DNA, 20 bp, Artificial Sequence
  Target HLA Sequence complement
tcgtggagaccaggcctgca

SEQ ID NO: 14764 - DNA, 20 bp, Artificial Sequence
  Target HLA Sequence complement
cgtggagaccaggcctgcag

SEQ ID NO: 14765 - DNA, 20 bp, Artificial Sequence
  Target HLA Sequence complement
gtggagaccaggcctgcagg

SEQ ID NO: 14766 - DNA, 20 bp, Artificial Sequence
  Target HLA Sequence complement
tggagaccaggcctgcaggg

SEQ ID NO: 14767 - DNA, 20 bp, Artificial Sequence
  Target HLA Sequence complement
ggagaccaggcctgcagggg

SEQ ID NO: 14768 - DNA, 20 bp, Artificial Sequence
  Target HLA Sequence complement
gagaccaggcctgcagggga

SEQ ID NO: 14769 - DNA, 20 bp, Artificial Sequence
  Target HLA Sequence complement
agaccaggcctgcaggggat

SEQ ID NO: 14770 - DNA, 20 bp, Artificial Sequence
  Target HLA Sequence complement
gaccaggcctgcaggggatg

SEQ ID NO: 14771 - DNA, 20 bp, Artificial Sequence
  Target HLA Sequence complement
accaggcctgcaggggatgg

SEQ ID NO: 14772 - DNA, 20 bp, Artificial Sequence
  Target HLA Sequence complement
ccaggcctgcaggggatgga

SEQ ID NO: 14773 - DNA, 20 bp, Artificial Sequence
  Target HLA Sequence complement
caggcctgcaggggatggaa

SEQ ID NO: 14774 - DNA, 20 bp, Artificial Sequence
  Target HLA Sequence complement
aggcctgcaggggatggaac

SEQ ID NO: 14775 - DNA, 20 bp, Artificial Sequence
  Target HLA Sequence complement
ggcctgcaggggatggaacc

SEQ ID NO: 14776 - DNA, 20 bp, Artificial Sequence
  Target HLA Sequence complement
gcctgcaggggatggaacct

SEQ ID NO: 14777 - DNA, 20 bp, Artificial Sequence
  Target HLA Sequence complement
cctgcaggggatggaacctt

SEQ ID NO: 14778 - DNA, 20 bp, Artificial Sequence
  Target HLA Sequence complement
ctgcaggggatggaaccttc

SEQ ID NO: 14779 - DNA, 20 bp, Artificial Sequence
  Target HLA Sequence complement
tgcaggggatggaaccttcc

SEQ ID NO: 14780 - DNA, 20 bp, Artificial Sequence
  Target HLA Sequence complement
gcaggggatggaaccttcca

SEQ ID NO: 14781 - DNA, 20 bp, Artificial Sequence
  Target HLA Sequence complement
caggggatggaaccttccag

SEQ ID NO: 14782 - DNA, 20 bp, Artificial Sequence
  Target HLA Sequence complement
ggaaccttccagaagtgggc

SEQ ID NO: 14783 - DNA, 20 bp, Artificial Sequence
  Target HLA Sequence complement
gaaccttccagaagtgggcg

SEQ ID NO: 14784 - DNA, 20 bp, Artificial Sequence
  Target HLA Sequence complement
aaccttccagaagtgggcgg

SEQ ID NO: 14785 - DNA, 20 bp, Artificial Sequence
  Target HLA Sequence complement
accttccagaagtgggcggc

SEQ ID NO: 14786 - DNA, 20 bp, Artificial Sequence
  Target HLA Sequence complement
ccttccagaagtgggcggct

SEQ ID NO: 14787 - DNA, 20 bp, Artificial Sequence
  Target HLA Sequence complement
cttccagaagtgggcggctg

SEQ ID NO: 14788 - DNA, 20 bp, Artificial Sequence
  Target HLA Sequence complement
ttccagaagtgggcggctgt

SEQ ID NO: 14789 - DNA, 20 bp, Artificial Sequence
  Target HLA Sequence complement
tccagaagtgggcggctgtg

SEQ ID NO: 14790 - DNA, 20 bp, Artificial Sequence
  Target HLA Sequence complement
ccagaagtgggcggctgtgg

SEQ ID NO: 14791 - DNA, 20 bp, Artificial Sequence
  Target HLA Sequence complement
cagaagtgggcggctgtggt

SEQ ID NO: 14792 - DNA, 20 bp, Artificial Sequence
  Target HLA Sequence complement
agaagtgggcggctgtggtg

SEQ ID NO: 14793 - DNA, 20 bp, Artificial Sequence
  Target HLA Sequence complement
gaagtgggcggctgtggtgg

SEQ ID NO: 14794 - DNA, 20 bp, Artificial Sequence
  Target HLA Sequence complement
aagtgggcggctgtggtggt

SEQ ID NO: 14795 - DNA, 20 bp, Artificial Sequence
  Target HLA Sequence complement
agtgggcggctgtggtggtg

SEQ ID NO: 14796 - DNA, 20 bp, Artificial Sequence
  Target HLA Sequence complement
gtgggcggctgtggtggtgc

SEQ ID NO: 14797 - DNA, 20 bp, Artificial Sequence
  Target HLA Sequence complement
tgggcggctgtggtggtgcc

SEQ ID NO: 14798 - DNA, 20 bp, Artificial Sequence
  Target HLA Sequence complement
gggcggctgtggtggtgcct

SEQ ID NO: 14799 - DNA, 20 bp, Artificial Sequence
  Target HLA Sequence complement
ggcggctgtggtggtgcctt

SEQ ID NO: 14800 - DNA, 20 bp, Artificial Sequence
  Target HLA Sequence complement
gcggctgtggtggtgccttc

SEQ ID NO: 14801 - DNA, 20 bp, Artificial Sequence
  Target HLA Sequence complement
cggctgtggtggtgccttct

SEQ ID NO: 14802 - DNA, 20 bp, Artificial Sequence
  Target HLA Sequence complement
ggctgtggtggtgccttctg

SEQ ID NO: 14803 - DNA, 20 bp, Artificial Sequence
  Target HLA Sequence complement
ctgtggtggtgccttctgga

SEQ ID NO: 14804 - DNA, 20 bp, Artificial Sequence
  Target HLA Sequence complement
tgtggtggtgccttctggac

SEQ ID NO: 14805 - DNA, 20 bp, Artificial Sequence
  Target HLA Sequence complement
gtggtggtgccttctggaca

SEQ ID NO: 14806 - DNA, 20 bp, Artificial Sequence
  Target HLA Sequence complement
tggtggtgccttctggacag

SEQ ID NO: 14807 - DNA, 20 bp, Artificial Sequence
  Target HLA Sequence complement
ggtggtgccttctggacagg

SEQ ID NO: 14808 - DNA, 20 bp, Artificial Sequence
  Target HLA Sequence complement
gtggtgccttctggacagga

SEQ ID NO: 14809 - DNA, 20 bp, Artificial Sequence
  Target HLA Sequence complement
tggtgccttctggacaggag

SEQ ID NO: 14810 - DNA, 20 bp, Artificial Sequence
  Target HLA Sequence complement
ggtgccttctggacaggagc

SEQ ID NO: 14811 - DNA, 20 bp, Artificial Sequence
  Target HLA Sequence complement
gtgccttctggacaggagca

SEQ ID NO: 14812 - DNA, 20 bp, Artificial Sequence
  Target HLA Sequence complement
tgccttctggacaggagcag

SEQ ID NO: 14813 - DNA, 20 bp, Artificial Sequence
  Target HLA Sequence complement
gccttctggacaggagcaga

SEQ ID NO: 14814 - DNA, 20 bp, Artificial Sequence
  Target HLA Sequence complement
ccttctggacaggagcagag

SEQ ID NO: 14815 - DNA, 20 bp, Artificial Sequence
  Target HLA Sequence complement
ggagcagagatacacctgcc

SEQ ID NO: 14816 - DNA, 20 bp, Artificial Sequence
  Target HLA Sequence complement
cacctgccatgtgcagcatg

SEQ ID NO: 14817 - DNA, 20 bp, Artificial Sequence
  Target HLA Sequence complement
cctgccatgtgcagcatgag

SEQ ID NO: 14818 - DNA, 20 bp, Artificial Sequence
  Target HLA Sequence complement
ctgccatgtgcagcatgagg

SEQ ID NO: 14819 - DNA, 20 bp, Artificial Sequence
  Target HLA Sequence complement
tgccatgtgcagcatgaggg

SEQ ID NO: 14820 - DNA, 20 bp, Artificial Sequence
  Target HLA Sequence complement
gccatgtgcagcatgagggt

SEQ ID NO: 14821 - DNA, 20 bp, Artificial Sequence
  Target HLA Sequence complement
gtgcagcatgagggtttgcc

SEQ ID NO: 14822 - DNA, 20 bp, Artificial Sequence
  Target HLA Sequence complement
tgcagcatgagggtttgccc

SEQ ID NO: 14823 - DNA, 20 bp, Artificial Sequence
  Target HLA Sequence complement
gcagcatgagggtttgccca

SEQ ID NO: 14824 - DNA, 20 bp, Artificial Sequence
  Target HLA Sequence complement
gcatgagggtttgcccaagc

SEQ ID NO: 14825 - DNA, 20 bp, Artificial Sequence
  Target HLA Sequence complement
catgagggtttgcccaagcc

SEQ ID NO: 14826 - DNA, 20 bp, Artificial Sequence
  Target HLA Sequence complement
atgagggtttgcccaagccc

SEQ ID NO: 14827 - DNA, 20 bp, Artificial Sequence
  Target HLA Sequence complement
tgagggtttgcccaagcccc

SEQ ID NO: 14828 - DNA, 20 bp, Artificial Sequence
  Target HLA Sequence complement
gagggtttgcccaagcccct

SEQ ID NO: 14829 - DNA, 20 bp, Artificial Sequence
  Target HLA Sequence complement
agggtttgcccaagcccctc

SEQ ID NO: 14830 - DNA, 20 bp, Artificial Sequence
  Target HLA Sequence complement
gggtttgcccaagcccctca

SEQ ID NO: 14831 - DNA, 20 bp, Artificial Sequence
  Target HLA Sequence complement
ggtttgcccaagcccctcac

SEQ ID NO: 14832 - DNA, 20 bp, Artificial Sequence
  Target HLA Sequence complement
gtttgcccaagcccctcacc

SEQ ID NO: 14833 - DNA, 20 bp, Artificial Sequence
  Target HLA Sequence complement
tttgcccaagcccctcaccc

SEQ ID NO: 14834 - DNA, 20 bp, Artificial Sequence
  Target HLA Sequence complement
ttgcccaagcccctcaccct

SEQ ID NO: 14835 - DNA, 20 bp, Artificial Sequence
  Target HLA Sequence complement
tgcccaagcccctcaccctg

SEQ ID NO: 14836 - DNA, 20 bp, Artificial Sequence
  Target HLA Sequence complement
gcccaagcccctcaccctga

SEQ ID NO: 14837 - DNA, 20 bp, Artificial Sequence
  Target HLA Sequence complement
cccaagcccctcaccctgag

SEQ ID NO: 14838 - DNA, 20 bp, Artificial Sequence
  Target HLA Sequence complement
ccaagcccctcaccctgaga

SEQ ID NO: 14839 - DNA, 20 bp, Artificial Sequence
  Target HLA Sequence complement
caagcccctcaccctgagat

SEQ ID NO: 14840 - DNA, 20 bp, Artificial Sequence
  Target HLA Sequence complement
aagcccctcaccctgagatg

SEQ ID NO: 14841 - DNA, 20 bp, Artificial Sequence
  Target HLA Sequence complement
agcccctcaccctgagatgg

SEQ ID NO: 14842 - DNA, 20 bp, Artificial Sequence
  Target HLA Sequence complement
gcccctcaccctgagatggg

SEQ ID NO: 14843 - DNA, 20 bp, Artificial Sequence
  Target HLA Sequence complement
cccctcaccctgagatggga

SEQ ID NO: 14844 - DNA, 20 bp, Artificial Sequence
  Target HLA Sequence complement
ccctcaccctgagatgggag

SEQ ID NO: 14845 - DNA, 20 bp, Artificial Sequence
  Target HLA Sequence complement
cctcaccctgagatgggagc

SEQ ID NO: 14846 - DNA, 20 bp, Artificial Sequence
  Target HLA Sequence complement
ctcaccctgagatgggagcc

SEQ ID NO: 14847 - DNA, 20 bp, Artificial Sequence
  Target HLA Sequence complement
tcaccctgagatgggagccg

SEQ ID NO: 14848 - DNA, 20 bp, Artificial Sequence
  Target HLA Sequence complement
caccctgagatgggagccgt

SEQ ID NO: 14849 - DNA, 20 bp, Artificial Sequence
  Target HLA Sequence complement
accctgagatgggagccgtc

SEQ ID NO: 14850 - DNA, 20 bp, Artificial Sequence
  Target HLA Sequence complement
ccctgagatgggagccgtct

SEQ ID NO: 14851 - DNA, 20 bp, Artificial Sequence
  Target HLA Sequence complement
cctgagatgggagccgtctt

SEQ ID NO: 14852 - DNA, 20 bp, Artificial Sequence
  Target HLA Sequence complement
ctgagatgggagccgtcttc

SEQ ID NO: 14853 - DNA, 20 bp, Artificial Sequence
  Target HLA Sequence complement
tgagatgggagccgtcttcc

SEQ ID NO: 14854 - DNA, 20 bp, Artificial Sequence
  Target HLA Sequence complement
gagatgggagccgtcttccc

SEQ ID NO: 14855 - DNA, 20 bp, Artificial Sequence
  Target HLA Sequence complement
agatgggagccgtcttccca

SEQ ID NO: 14856 - DNA, 20 bp, Artificial Sequence
  Target HLA Sequence complement
gatgggagccgtcttcccag

SEQ ID NO: 14857 - DNA, 20 bp, Artificial Sequence
  Target HLA Sequence complement
atgggagccgtcttcccagc

SEQ ID NO: 14858 - DNA, 20 bp, Artificial Sequence
  Target HLA Sequence complement
tgggagccgtcttcccagcc

SEQ ID NO: 14859 - DNA, 20 bp, Artificial Sequence
  Target HLA Sequence complement
gggagccgtcttcccagccc

SEQ ID NO: 14860 - DNA, 20 bp, Artificial Sequence
  Target HLA Sequence complement
ggagccgtcttcccagccca

SEQ ID NO: 14861 - DNA, 20 bp, Artificial Sequence
  Target HLA Sequence complement
gagccgtcttcccagcccac

SEQ ID NO: 14862 - DNA, 20 bp, Artificial Sequence
  Target HLA Sequence complement
agccgtcttcccagcccacc

SEQ ID NO: 14863 - DNA, 20 bp, Artificial Sequence
  Target HLA Sequence complement
gccgtcttcccagcccacca

SEQ ID NO: 14864 - DNA, 20 bp, Artificial Sequence
  Target HLA Sequence complement
ccgtcttcccagcccaccat

SEQ ID NO: 14865 - DNA, 20 bp, Artificial Sequence
  Target HLA Sequence complement
cgtcttcccagcccaccatc

SEQ ID NO: 14866 - DNA, 20 bp, Artificial Sequence
  Target HLA Sequence complement
gtcttcccagcccaccatcc

SEQ ID NO: 14867 - DNA, 20 bp, Artificial Sequence
  Target HLA Sequence complement
tcttcccagcccaccatccc

SEQ ID NO: 14868 - DNA, 20 bp, Artificial Sequence
  Target HLA Sequence complement
cttcccagcccaccatcccc

SEQ ID NO: 14869 - DNA, 20 bp, Artificial Sequence
  Target HLA Sequence complement
ttcccagcccaccatcccca

SEQ ID NO: 14870 - DNA, 20 bp, Artificial Sequence
  Target HLA Sequence complement
tcccagcccaccatccccat

SEQ ID NO: 14871 - DNA, 20 bp, Artificial Sequence
  Target HLA Sequence complement
cccagcccaccatccccatc

SEQ ID NO: 14872 - DNA, 20 bp, Artificial Sequence
  Target HLA Sequence complement
ccagcccaccatccccatcg

SEQ ID NO: 14873 - DNA, 20 bp, Artificial Sequence
  Target HLA Sequence complement
cagcccaccatccccatcgt

SEQ ID NO: 14874 - DNA, 20 bp, Artificial Sequence
  Target HLA Sequence complement
agcccaccatccccatcgtg

SEQ ID NO: 14875 - DNA, 20 bp, Artificial Sequence
  Target HLA Sequence complement
gcccaccatccccatcgtgg

SEQ ID NO: 14876 - DNA, 20 bp, Artificial Sequence
  Target HLA Sequence complement
cccaccatccccatcgtggg

SEQ ID NO: 14877 - DNA, 20 bp, Artificial Sequence
  Target HLA Sequence complement
ccaccatccccatcgtgggc

SEQ ID NO: 14878 - DNA, 20 bp, Artificial Sequence
  Target HLA Sequence complement
caccatccccatcgtgggca

SEQ ID NO: 14879 - DNA, 20 bp, Artificial Sequence
  Target HLA Sequence complement
accatccccatcgtgggcat

SEQ ID NO: 14880 - DNA, 20 bp, Artificial Sequence
  Target HLA Sequence complement
ccatccccatcgtgggcatc

SEQ ID NO: 14881 - DNA, 20 bp, Artificial Sequence
  Target HLA Sequence complement
catccccatcgtgggcatca

SEQ ID NO: 14882 - DNA, 20 bp, Artificial Sequence
  Target HLA Sequence complement
ccccatcgtgggcatcattg

SEQ ID NO: 14883 - DNA, 20 bp, Artificial Sequence
  Target HLA Sequence complement
cccatcgtgggcatcattgc

SEQ ID NO: 14884 - DNA, 20 bp, Artificial Sequence
  Target HLA Sequence complement
tcgtgggcatcattgctggc

SEQ ID NO: 14885 - DNA, 20 bp, Artificial Sequence
  Target HLA Sequence complement
cgtgggcatcattgctggcc

SEQ ID NO: 14886 - DNA, 20 bp, Artificial Sequence
  Target HLA Sequence complement
gtgggcatcattgctggcct

SEQ ID NO: 14887 - DNA, 20 bp, Artificial Sequence
  Target HLA Sequence complement
tgggcatcattgctggcctg

SEQ ID NO: 14888 - DNA, 20 bp, Artificial Sequence
  Target HLA Sequence complement
gggcatcattgctggcctgg

SEQ ID NO: 14889 - DNA, 20 bp, Artificial Sequence
  Target HLA Sequence complement
ggcatcattgctggcctggt

SEQ ID NO: 14890 - DNA, 20 bp, Artificial Sequence
  Target HLA Sequence complement
gctggcctggttctctttgg

SEQ ID NO: 14891 - DNA, 20 bp, Artificial Sequence
  Target HLA Sequence complement
ggcctggttctctttggagc

SEQ ID NO: 14892 - DNA, 20 bp, Artificial Sequence
  Target HLA Sequence complement
ggagctgtgatcactggagc

SEQ ID NO: 14893 - DNA, 20 bp, Artificial Sequence
  Target HLA Sequence complement
gatcactggagctgtggtcg

SEQ ID NO: 14894 - DNA, 20 bp, Artificial Sequence
  Target HLA Sequence complement
atcactggagctgtggtcgc

SEQ ID NO: 14895 - DNA, 20 bp, Artificial Sequence
  Target HLA Sequence complement
tcactggagctgtggtcgct

SEQ ID NO: 14896 - DNA, 20 bp, Artificial Sequence
  Target HLA Sequence complement
cactggagctgtggtcgctg

SEQ ID NO: 14897 - DNA, 20 bp, Artificial Sequence
  Target HLA Sequence complement
actggagctgtggtcgctgc

SEQ ID NO: 14898 - DNA, 20 bp, Artificial Sequence
  Target HLA Sequence complement
ctggagctgtggtcgctgct

SEQ ID NO: 14899 - DNA, 20 bp, Artificial Sequence
  Target HLA Sequence complement
tggagctgtggtcgctgctg

SEQ ID NO: 14900 - DNA, 20 bp, Artificial Sequence
  Target HLA Sequence complement
ggagctgtggtcgctgctgt

SEQ ID NO: 14901 - DNA, 20 bp, Artificial Sequence
  Target HLA Sequence complement
gagctgtggtcgctgctgtg

SEQ ID NO: 14902 - DNA, 20 bp, Artificial Sequence
  Target HLA Sequence complement
agctgtggtcgctgctgtga

SEQ ID NO: 14903 - DNA, 20 bp, Artificial Sequence
  Target HLA Sequence complement
gctgtggtcgctgctgtgat

SEQ ID NO: 14904 - DNA, 20 bp, Artificial Sequence
  Target HLA Sequence complement
ctgtggtcgctgctgtgatg

SEQ ID NO: 14905 - DNA, 20 bp, Artificial Sequence
  Target HLA Sequence complement
gtggtcgctgctgtgatgtg

SEQ ID NO: 14906 - DNA, 20 bp, Artificial Sequence
  Target HLA Sequence complement
tggtcgctgctgtgatgtgg

SEQ ID NO: 14907 - DNA, 20 bp, Artificial Sequence
  Target HLA Sequence complement
ggtcgctgctgtgatgtgga

SEQ ID NO: 14908 - DNA, 20 bp, Artificial Sequence
  Target HLA Sequence complement
gtcgctgctgtgatgtggag

SEQ ID NO: 14909 - DNA, 20 bp, Artificial Sequence
  Target HLA Sequence complement
tcgctgctgtgatgtggagg

SEQ ID NO: 14910 - DNA, 20 bp, Artificial Sequence
  Target HLA Sequence complement
cgctgctgtgatgtggagga

SEQ ID NO: 14911 - DNA, 20 bp, Artificial Sequence
  Target HLA Sequence complement
gctgctgtgatgtggaggag

SEQ ID NO: 14912 - DNA, 20 bp, Artificial Sequence
  Target HLA Sequence complement
ctgctgtgatgtggaggagg

SEQ ID NO: 14913 - DNA, 20 bp, Artificial Sequence
  Target HLA Sequence complement
gtggaggaggaagagctcag

SEQ ID NO: 14914 - DNA, 20 bp, Artificial Sequence
  Target HLA Sequence complement
aggagggagctactctcagg

SEQ ID NO: 14915 - DNA, 20 bp, Artificial Sequence
  Target HLA Sequence complement
ggagggagctactctcaggc

SEQ ID NO: 14916 - DNA, 20 bp, Artificial Sequence
  Target HLA Sequence complement
gagggagctactctcaggct

SEQ ID NO: 14917 - DNA, 20 bp, Artificial Sequence
  Target HLA Sequence complement
agggagctactctcaggctg

SEQ ID NO: 14918 - DNA, 20 bp, Artificial Sequence
  Target HLA Sequence complement
gggagctactctcaggctgc

SEQ ID NO: 14919 - DNA, 20 bp, Artificial Sequence
  Target HLA Sequence complement
ggagctactctcaggctgca

SEQ ID NO: 14920 - DNA, 20 bp, Artificial Sequence
  Target HLA Sequence complement
gctactctcaggctgcaagc

SEQ ID NO: 14921 - DNA, 20 bp, Artificial Sequence
  Target HLA Sequence complement
ctctcaggctgcaagcagtg

SEQ ID NO: 14922 - DNA, 20 bp, Artificial Sequence
  Target HLA Sequence complement
ctcaggctgcaagcagtgac

SEQ ID NO: 14923 - DNA, 20 bp, Artificial Sequence
  Target HLA Sequence complement
caggctgcaagcagtgacag

SEQ ID NO: 14924 - DNA, 20 bp, Artificial Sequence
  Target HLA Sequence complement
ggctgcaagcagtgacagtg

SEQ ID NO: 14925 - DNA, 20 bp, Artificial Sequence
  Target HLA Sequence complement
gctgcaagcagtgacagtgc

SEQ ID NO: 14926 - DNA, 20 bp, Artificial Sequence
  Target HLA Sequence complement
ctgcaagcagtgacagtgcc

SEQ ID NO: 14927 - DNA, 20 bp, Artificial Sequence
  Target HLA Sequence complement
tgcaagcagtgacagtgccc

SEQ ID NO: 14928 - DNA, 20 bp, Artificial Sequence
  Target HLA Sequence complement
gcaagcagtgacagtgccca

SEQ ID NO: 14929 - DNA, 20 bp, Artificial Sequence
  Target HLA Sequence complement
caagcagtgacagtgcccag

SEQ ID NO: 14930 - DNA, 20 bp, Artificial Sequence
  Target HLA Sequence complement
aagcagtgacagtgcccagg

SEQ ID NO: 14931 - DNA, 20 bp, Artificial Sequence
  Target HLA Sequence complement
agcagtgacagtgcccaggg

SEQ ID NO: 14932 - DNA, 20 bp, Artificial Sequence
  Target HLA Sequence complement
gcagtgacagtgcccagggc

SEQ ID NO: 14933 - DNA, 20 bp, Artificial Sequence
  Target HLA Sequence complement
cagtgacagtgcccagggct

SEQ ID NO: 14934 - DNA, 20 bp, Artificial Sequence
  Target HLA Sequence complement
agtgacagtgcccagggctc

SEQ ID NO: 14935 - DNA, 20 bp, Artificial Sequence
  Target HLA Sequence complement
gtgacagtgcccagggctct

SEQ ID NO: 14936 - DNA, 20 bp, Artificial Sequence
  Target HLA Sequence complement
tgacagtgcccagggctctg

SEQ ID NO: 14937 - DNA, 20 bp, Artificial Sequence
  Target HLA Sequence complement
gacagtgcccagggctctga

SEQ ID NO: 14938 - DNA, 20 bp, Artificial Sequence
  Target HLA Sequence complement
acagtgcccagggctctgat

SEQ ID NO: 14939 - DNA, 20 bp, Artificial Sequence
  Target HLA Sequence complement
cagtgcccagggctctgatg

SEQ ID NO: 14940 - DNA, 20 bp, Artificial Sequence
  Target HLA Sequence complement
agtgcccagggctctgatgt

SEQ ID NO: 14941 - DNA, 20 bp, Artificial Sequence
  Target HLA Sequence complement
gtgcccagggctctgatgtg

SEQ ID NO: 14942 - DNA, 20 bp, Artificial Sequence
  Target HLA Sequence complement
tgcccagggctctgatgtgt

SEQ ID NO: 14943 - DNA, 20 bp, Artificial Sequence
  Target HLA Sequence complement
gcccagggctctgatgtgtc

SEQ ID NO: 14944 - DNA, 20 bp, Artificial Sequence
  Target HLA Sequence complement
cccagggctctgatgtgtct

SEQ ID NO: 14945 - DNA, 20 bp, Artificial Sequence
  Target HLA Sequence complement
ccagggctctgatgtgtctc

SEQ ID NO: 14946 - DNA, 20 bp, Artificial Sequence
  Target HLA Sequence complement
gagacagctgccttgtgtgg

SEQ ID NO: 14947 - DNA, 20 bp, Artificial Sequence
  Target HLA Sequence complement
agacagctgccttgtgtggg

SEQ ID NO: 14948 - DNA, 20 bp, Artificial Sequence
  Target HLA Sequence complement
gacagctgccttgtgtggga

SEQ ID NO: 14949 - DNA, 20 bp, Artificial Sequence
  Target HLA Sequence complement
acagctgccttgtgtgggac

SEQ ID NO: 14950 - DNA, 20 bp, Artificial Sequence
  Target HLA Sequence complement
cagctgccttgtgtgggact

SEQ ID NO: 14951 - DNA, 20 bp, Artificial Sequence
  Target HLA Sequence complement
agctgccttgtgtgggactg

SEQ ID NO: 14952 - DNA, 20 bp, Artificial Sequence
  Target HLA Sequence complement
gctgccttgtgtgggactga

SEQ ID NO: 14953 - DNA, 20 bp, Artificial Sequence
  Target HLA Sequence complement
ctgccttgtgtgggactgag

SEQ ID NO: 14954 - DNA, 20 bp, Artificial Sequence
  Target HLA Sequence complement
gccttgtgtgggactgagag

SEQ ID NO: 14955 - DNA, 20 bp, Artificial Sequence
  Target HLA Sequence complement
ccttgtgtgggactgagagg

SEQ ID NO: 14956 - DNA, 20 bp, Artificial Sequence
  Target HLA Sequence complement
cttgtgtgggactgagaggc

SEQ ID NO: 14957 - DNA, 20 bp, Artificial Sequence
  Target HLA Sequence complement
gtgtgggactgagaggcaag

SEQ ID NO: 14958 - DNA, 20 bp, Artificial Sequence
  Target HLA Sequence complement
gtgggactgagaggcaagag

SEQ ID NO: 14959 - DNA, 20 bp, Artificial Sequence
  Target HLA Sequence complement
ggcaagagttgttcctgccc

SEQ ID NO: 14960 - DNA, 20 bp, Artificial Sequence
  Target HLA Sequence complement
gagttgttcctgcccttccc

SEQ ID NO: 14961 - DNA, 20 bp, Artificial Sequence
  Target HLA Sequence complement
cctgcccttccctttgtgac

SEQ ID NO: 14962 - DNA, 20 bp, Artificial Sequence
  Target HLA Sequence complement
ggcacctgcatgtgtctgtg

SEQ ID NO: 14963 - DNA, 20 bp, Artificial Sequence
  Target HLA Sequence complement
atgtgaggaggtggggagac

SEQ ID NO: 14964 - DNA, 20 bp, Artificial Sequence
  Target HLA Sequence complement
tgtgaggaggtggggagacc

SEQ ID NO: 14965 - DNA, 20 bp, Artificial Sequence
  Target HLA Sequence complement
gtgaggaggtggggagacca

SEQ ID NO: 14966 - DNA, 20 bp, Artificial Sequence
  Target HLA Sequence complement
tgaggaggtggggagaccac

SEQ ID NO: 14967 - DNA, 20 bp, Artificial Sequence
  Target HLA Sequence complement
gaggaggtggggagaccacc

SEQ ID NO: 14968 - DNA, 20 bp, Artificial Sequence
  Target HLA Sequence complement
aggaggtggggagaccaccc

SEQ ID NO: 14969 - DNA, 20 bp, Artificial Sequence
  Target HLA Sequence complement
ggaggtggggagaccacccc

SEQ ID NO: 14970 - DNA, 20 bp, Artificial Sequence
  Target HLA Sequence complement
gaggtggggagaccacccca

SEQ ID NO: 14971 - DNA, 20 bp, Artificial Sequence
  Target HLA Sequence complement
aggtggggagaccaccccac

SEQ ID NO: 14972 - DNA, 20 bp, Artificial Sequence
  Target HLA Sequence complement
ggtggggagaccaccccacc

SEQ ID NO: 14973 - DNA, 20 bp, Artificial Sequence
  Target HLA Sequence complement
gtggggagaccaccccaccc

SEQ ID NO: 14974 - DNA, 20 bp, Artificial Sequence
  Target HLA Sequence complement
tggggagaccaccccacccc

SEQ ID NO: 14975 - DNA, 20 bp, Artificial Sequence
  Target HLA Sequence complement
ggggagaccaccccaccccc

SEQ ID NO: 14976 - DNA, 20 bp, Artificial Sequence
  Target HLA Sequence complement
gggagaccaccccaccccca

SEQ ID NO: 14977 - DNA, 20 bp, Artificial Sequence
  Target HLA Sequence complement
ggagaccaccccacccccat

SEQ ID NO: 14978 - DNA, 20 bp, Artificial Sequence
  Target HLA Sequence complement
gagaccaccccacccccatg

SEQ ID NO: 14979 - DNA, 20 bp, Artificial Sequence
  Target HLA Sequence complement
agaccaccccacccccatgt

SEQ ID NO: 14980 - DNA, 20 bp, Artificial Sequence
  Target HLA Sequence complement
gaccaccccacccccatgtc

SEQ ID NO: 14981 - DNA, 20 bp, Artificial Sequence
  Target HLA Sequence complement
accaccccacccccatgtcc

SEQ ID NO: 14982 - DNA, 20 bp, Artificial Sequence
  Target HLA Sequence complement
ccaccccacccccatgtcca

SEQ ID NO: 14983 - DNA, 20 bp, Artificial Sequence
  Target HLA Sequence complement
caccccacccccatgtccac

SEQ ID NO: 14984 - DNA, 20 bp, Artificial Sequence
  Target HLA Sequence complement
accccacccccatgtccacc

SEQ ID NO: 14985 - DNA, 20 bp, Artificial Sequence
  Target HLA Sequence complement
ccccacccccatgtccacca

SEQ ID NO: 14986 - DNA, 20 bp, Artificial Sequence
  Target HLA Sequence complement
cccacccccatgtccaccat

SEQ ID NO: 14987 - DNA, 20 bp, Artificial Sequence
  Target HLA Sequence complement
ccacccccatgtccaccatg

SEQ ID NO: 14988 - DNA, 20 bp, Artificial Sequence
  Target HLA Sequence complement
cacccccatgtccaccatga

SEQ ID NO: 14989 - DNA, 20 bp, Artificial Sequence
  Target HLA Sequence complement
acccccatgtccaccatgac

SEQ ID NO: 14990 - DNA, 20 bp, Artificial Sequence
  Target HLA Sequence complement
cccccatgtccaccatgacc

SEQ ID NO: 14991 - DNA, 20 bp, Artificial Sequence
  Target HLA Sequence complement
ccccatgtccaccatgaccc

SEQ ID NO: 14992 - DNA, 20 bp, Artificial Sequence
  Target HLA Sequence complement
cccatgtccaccatgaccct

SEQ ID NO: 14993 - DNA, 20 bp, Artificial Sequence
  Target HLA Sequence complement
ccatgtccaccatgaccctc

SEQ ID NO: 14994 - DNA, 20 bp, Artificial Sequence
  Target HLA Sequence complement
gtccaccatgaccctcttcc

SEQ ID NO: 14995 - DNA, 20 bp, Artificial Sequence
  Target HLA Sequence complement
tccaccatgaccctcttccc

SEQ ID NO: 14996 - DNA, 20 bp, Artificial Sequence
  Target HLA Sequence complement
ccaccatgaccctcttccca

SEQ ID NO: 14997 - DNA, 20 bp, Artificial Sequence
  Target HLA Sequence complement
caccatgaccctcttcccac

SEQ ID NO: 14998 - DNA, 20 bp, Artificial Sequence
  Target HLA Sequence complement
accatgaccctcttcccacg

SEQ ID NO: 14999 - DNA, 20 bp, Artificial Sequence
  Target HLA Sequence complement
ccatgaccctcttcccacgc

SEQ ID NO: 15000 - DNA, 20 bp, Artificial Sequence
  Target HLA Sequence complement
catgaccctcttcccacgct

SEQ ID NO: 15001 - DNA, 20 bp, Artificial Sequence
  Target HLA Sequence complement
atgaccctcttcccacgctg

SEQ ID NO: 15002 - DNA, 20 bp, Artificial Sequence
  Target HLA Sequence complement
tgaccctcttcccacgctga

SEQ ID NO: 15003 - DNA, 20 bp, Artificial Sequence
  Target HLA Sequence complement
gaccctcttcccacgctgac

SEQ ID NO: 15004 - DNA, 20 bp, Artificial Sequence
  Target HLA Sequence complement
accctcttcccacgctgacc

SEQ ID NO: 15005 - DNA, 20 bp, Artificial Sequence
  Target HLA Sequence complement
ccctcttcccacgctgacct

SEQ ID NO: 15006 - DNA, 20 bp, Artificial Sequence
  Target HLA Sequence complement
cctcttcccacgctgacctg

SEQ ID NO: 15007 - DNA, 20 bp, Artificial Sequence
  Target HLA Sequence complement
ctcttcccacgctgacctgt

SEQ ID NO: 15008 - DNA, 20 bp, Artificial Sequence
  Target HLA Sequence complement
tcttcccacgctgacctgtg

SEQ ID NO: 15009 - DNA, 20 bp, Artificial Sequence
  Target HLA Sequence complement
cttcccacgctgacctgtgc

SEQ ID NO: 15010 - DNA, 20 bp, Artificial Sequence
  Target HLA Sequence complement
ttcccacgctgacctgtgct

SEQ ID NO: 15011 - DNA, 20 bp, Artificial Sequence
  Target HLA Sequence complement
tcccacgctgacctgtgctc

SEQ ID NO: 15012 - DNA, 20 bp, Artificial Sequence
  Target HLA Sequence complement
cccacgctgacctgtgctcc

SEQ ID NO: 15013 - DNA, 20 bp, Artificial Sequence
  Target HLA Sequence complement
ccacgctgacctgtgctccc

SEQ ID NO: 15014 - DNA, 20 bp, Artificial Sequence
  Target HLA Sequence complement
cacgctgacctgtgctccct

SEQ ID NO: 15015 - DNA, 20 bp, Artificial Sequence
  Target HLA Sequence complement
acgctgacctgtgctccctc

SEQ ID NO: 15016 - DNA, 20 bp, Artificial Sequence
  Target HLA Sequence complement
cgctgacctgtgctccctcc

SEQ ID NO: 15017 - DNA, 20 bp, Artificial Sequence
  Target HLA Sequence complement
gctgacctgtgctccctccc

SEQ ID NO: 15018 - DNA, 20 bp, Artificial Sequence
  Target HLA Sequence complement
ctgacctgtgctccctcccc

SEQ ID NO: 15019 - DNA, 20 bp, Artificial Sequence
  Target HLA Sequence complement
tgacctgtgctccctcccca

SEQ ID NO: 15020 - DNA, 20 bp, Artificial Sequence
  Target HLA Sequence complement
gacctgtgctccctccccaa

SEQ ID NO: 15021 - DNA, 20 bp, Artificial Sequence
  Target HLA Sequence complement
acctgtgctccctccccaat

SEQ ID NO: 15022 - DNA, 20 bp, Artificial Sequence
  Target HLA Sequence complement
cctgtgctccctccccaatc

SEQ ID NO: 15023 - DNA, 20 bp, Artificial Sequence
  Target HLA Sequence complement
ctgtgctccctccccaatca

SEQ ID NO: 15024 - DNA, 20 bp, Artificial Sequence
  Target HLA Sequence complement
gtgctccctccccaatcatc

SEQ ID NO: 15025 - DNA, 20 bp, Artificial Sequence
  Target HLA Sequence complement
tcctgttccagagaggtggg

SEQ ID NO: 15026 - DNA, 20 bp, Artificial Sequence
  Target HLA Sequence complement
cctgttccagagaggtgggg

SEQ ID NO: 15027 - DNA, 20 bp, Artificial Sequence
  Target HLA Sequence complement
ctgttccagagaggtggggc

SEQ ID NO: 15028 - DNA, 20 bp, Artificial Sequence
  Target HLA Sequence complement
tgttccagagaggtggggct

SEQ ID NO: 15029 - DNA, 20 bp, Artificial Sequence
  Target HLA Sequence complement
gttccagagaggtggggctg

SEQ ID NO: 15030 - DNA, 20 bp, Artificial Sequence
  Target HLA Sequence complement
ttccagagaggtggggctga

SEQ ID NO: 15031 - DNA, 20 bp, Artificial Sequence
  Target HLA Sequence complement
tccagagaggtggggctgag

SEQ ID NO: 15032 - DNA, 20 bp, Artificial Sequence
  Target HLA Sequence complement
ccagagaggtggggctgagg

SEQ ID NO: 15033 - DNA, 20 bp, Artificial Sequence
  Target HLA Sequence complement
cagagaggtggggctgaggt

SEQ ID NO: 15034 - DNA, 20 bp, Artificial Sequence
  Target HLA Sequence complement
agagaggtggggctgaggtg

SEQ ID NO: 15035 - DNA, 20 bp, Artificial Sequence
  Target HLA Sequence complement
gagaggtggggctgaggtgt

SEQ ID NO: 15036 - DNA, 20 bp, Artificial Sequence
  Target HLA Sequence complement
agaggtggggctgaggtgtc

SEQ ID NO: 15037 - DNA, 20 bp, Artificial Sequence
  Target HLA Sequence complement
gaggtggggctgaggtgtct

SEQ ID NO: 15038 - DNA, 20 bp, Artificial Sequence
  Target HLA Sequence complement
aggtggggctgaggtgtctc

SEQ ID NO: 15039 - DNA, 20 bp, Artificial Sequence
  Target HLA Sequence complement
ggtggggctgaggtgtctcc

SEQ ID NO: 15040 - DNA, 20 bp, Artificial Sequence
  Target HLA Sequence complement
gtggggctgaggtgtctcca

SEQ ID NO: 15041 - DNA, 20 bp, Artificial Sequence
  Target HLA Sequence complement
tggggctgaggtgtctccat

SEQ ID NO: 15042 - DNA, 20 bp, Artificial Sequence
  Target HLA Sequence complement
ggggctgaggtgtctccatc

SEQ ID NO: 15043 - DNA, 20 bp, Artificial Sequence
  Target HLA Sequence complement
gggctgaggtgtctccatct

SEQ ID NO: 15044 - DNA, 20 bp, Artificial Sequence
  Target HLA Sequence complement
ggctgaggtgtctccatctc

SEQ ID NO: 15045 - DNA, 21 bp, Artificial Sequence
  Target HLA Sequence complement
cagaagcagaggggtcagggc

SEQ ID NO: 15046 - DNA, 21 bp, Artificial Sequence
  Target HLA Sequence complement
agaagcagaggggtcagggcg

SEQ ID NO: 15047 - DNA, 21 bp, Artificial Sequence
  Target HLA Sequence complement
gaagcagaggggtcagggcga

SEQ ID NO: 15048 - DNA, 21 bp, Artificial Sequence
  Target HLA Sequence complement
aagcagaggggtcagggcgaa

SEQ ID NO: 15049 - DNA, 21 bp, Artificial Sequence
  Target HLA Sequence complement
agcagaggggtcagggcgaag

SEQ ID NO: 15050 - DNA, 21 bp, Artificial Sequence
  Target HLA Sequence complement
gcagaggggtcagggcgaagt

SEQ ID NO: 15051 - DNA, 21 bp, Artificial Sequence
  Target HLA Sequence complement
cagaggggtcagggcgaagtc

SEQ ID NO: 15052 - DNA, 21 bp, Artificial Sequence
  Target HLA Sequence complement
agaggggtcagggcgaagtcc

SEQ ID NO: 15053 - DNA, 21 bp, Artificial Sequence
  Target HLA Sequence complement
gaggggtcagggcgaagtccc

SEQ ID NO: 15054 - DNA, 21 bp, Artificial Sequence
  Target HLA Sequence complement
aggggtcagggcgaagtccca

SEQ ID NO: 15055 - DNA, 21 bp, Artificial Sequence
  Target HLA Sequence complement
ggggtcagggcgaagtcccag

SEQ ID NO: 15056 - DNA, 21 bp, Artificial Sequence
  Target HLA Sequence complement
gggtcagggcgaagtcccagg

SEQ ID NO: 15057 - DNA, 21 bp, Artificial Sequence
  Target HLA Sequence complement
ggtcagggcgaagtcccaggg

SEQ ID NO: 15058 - DNA, 21 bp, Artificial Sequence
  Target HLA Sequence complement
gtcagggcgaagtcccagggc

SEQ ID NO: 15059 - DNA, 21 bp, Artificial Sequence
  Target HLA Sequence complement
tcagggcgaagtcccagggcc

SEQ ID NO: 15060 - DNA, 21 bp, Artificial Sequence
  Target HLA Sequence complement
cagggcgaagtcccagggccc

SEQ ID NO: 15061 - DNA, 21 bp, Artificial Sequence
  Target HLA Sequence complement
agggcgaagtcccagggcccc

SEQ ID NO: 15062 - DNA, 21 bp, Artificial Sequence
  Target HLA Sequence complement
gggcgaagtcccagggcccca

SEQ ID NO: 15063 - DNA, 21 bp, Artificial Sequence
  Target HLA Sequence complement
ggcgaagtcccagggccccag

SEQ ID NO: 15064 - DNA, 21 bp, Artificial Sequence
  Target HLA Sequence complement
gcgaagtcccagggccccagg

SEQ ID NO: 15065 - DNA, 21 bp, Artificial Sequence
  Target HLA Sequence complement
cgaagtcccagggccccaggc

SEQ ID NO: 15066 - DNA, 21 bp, Artificial Sequence
  Target HLA Sequence complement
gaagtcccagggccccaggcg

SEQ ID NO: 15067 - DNA, 21 bp, Artificial Sequence
  Target HLA Sequence complement
aagtcccagggccccaggcgt

SEQ ID NO: 15068 - DNA, 21 bp, Artificial Sequence
  Target HLA Sequence complement
agtcccagggccccaggcgtg

SEQ ID NO: 15069 - DNA, 21 bp, Artificial Sequence
  Target HLA Sequence complement
gtcccagggccccaggcgtgg

SEQ ID NO: 15070 - DNA, 21 bp, Artificial Sequence
  Target HLA Sequence complement
tcccagggccccaggcgtggc

SEQ ID NO: 15071 - DNA, 21 bp, Artificial Sequence
  Target HLA Sequence complement
cccagggccccaggcgtggct

SEQ ID NO: 15072 - DNA, 21 bp, Artificial Sequence
  Target HLA Sequence complement
ccagggccccaggcgtggctc

SEQ ID NO: 15073 - DNA, 21 bp, Artificial Sequence
  Target HLA Sequence complement
cagggccccaggcgtggctct

SEQ ID NO: 15074 - DNA, 21 bp, Artificial Sequence
  Target HLA Sequence complement
agggccccaggcgtggctctc

SEQ ID NO: 15075 - DNA, 21 bp, Artificial Sequence
  Target HLA Sequence complement
gggccccaggcgtggctctca

SEQ ID NO: 15076 - DNA, 21 bp, Artificial Sequence
  Target HLA Sequence complement
ggccccaggcgtggctctcag

SEQ ID NO: 15077 - DNA, 21 bp, Artificial Sequence
  Target HLA Sequence complement
gccccaggcgtggctctcagg

SEQ ID NO: 15078 - DNA, 21 bp, Artificial Sequence
  Target HLA Sequence complement
ccccaggcgtggctctcaggg

SEQ ID NO: 15079 - DNA, 21 bp, Artificial Sequence
  Target HLA Sequence complement
cccaggcgtggctctcagggt

SEQ ID NO: 15080 - DNA, 21 bp, Artificial Sequence
  Target HLA Sequence complement
ccaggcgtggctctcagggtc

SEQ ID NO: 15081 - DNA, 21 bp, Artificial Sequence
  Target HLA Sequence complement
caggcgtggctctcagggtct

SEQ ID NO: 15082 - DNA, 21 bp, Artificial Sequence
  Target HLA Sequence complement
aggcgtggctctcagggtctc

SEQ ID NO: 15083 - DNA, 21 bp, Artificial Sequence
  Target HLA Sequence complement
ggcgtggctctcagggtctca

SEQ ID NO: 15084 - DNA, 21 bp, Artificial Sequence
  Target HLA Sequence complement
gcgtggctctcagggtctcag

SEQ ID NO: 15085 - DNA, 21 bp, Artificial Sequence
  Target HLA Sequence complement
cgtggctctcagggtctcagg

SEQ ID NO: 15086 - DNA, 21 bp, Artificial Sequence
  Target HLA Sequence complement
gtggctctcagggtctcaggc

SEQ ID NO: 15087 - DNA, 21 bp, Artificial Sequence
  Target HLA Sequence complement
tggctctcagggtctcaggcc

SEQ ID NO: 15088 - DNA, 21 bp, Artificial Sequence
  Target HLA Sequence complement
ggctctcagggtctcaggccc

SEQ ID NO: 15089 - DNA, 21 bp, Artificial Sequence
  Target HLA Sequence complement
gctctcagggtctcaggcccc

SEQ ID NO: 15090 - DNA, 21 bp, Artificial Sequence
  Target HLA Sequence complement
ctctcagggtctcaggccccg

SEQ ID NO: 15091 - DNA, 21 bp, Artificial Sequence
  Target HLA Sequence complement
tctcagggtctcaggccccga

SEQ ID NO: 15092 - DNA, 21 bp, Artificial Sequence
  Target HLA Sequence complement
ctcagggtctcaggccccgaa

SEQ ID NO: 15093 - DNA, 21 bp, Artificial Sequence
  Target HLA Sequence complement
tcagggtctcaggccccgaag

SEQ ID NO: 15094 - DNA, 21 bp, Artificial Sequence
  Target HLA Sequence complement
cagggtctcaggccccgaagg

SEQ ID NO: 15095 - DNA, 21 bp, Artificial Sequence
  Target HLA Sequence complement
agggtctcaggccccgaaggc

SEQ ID NO: 15096 - DNA, 21 bp, Artificial Sequence
  Target HLA Sequence complement
gggtctcaggccccgaaggcg

SEQ ID NO: 15097 - DNA, 21 bp, Artificial Sequence
  Target HLA Sequence complement
ggtctcaggccccgaaggcgg

SEQ ID NO: 15098 - DNA, 21 bp, Artificial Sequence
  Target HLA Sequence complement
gtctcaggccccgaaggcggt

SEQ ID NO: 15099 - DNA, 21 bp, Artificial Sequence
  Target HLA Sequence complement
tctcaggccccgaaggcggtg

SEQ ID NO: 15100 - DNA, 21 bp, Artificial Sequence
  Target HLA Sequence complement
ctcaggccccgaaggcggtgt

SEQ ID NO: 15101 - DNA, 21 bp, Artificial Sequence
  Target HLA Sequence complement
tcaggccccgaaggcggtgta

SEQ ID NO: 15102 - DNA, 21 bp, Artificial Sequence
  Target HLA Sequence complement
caggccccgaaggcggtgtat

SEQ ID NO: 15103 - DNA, 21 bp, Artificial Sequence
  Target HLA Sequence complement
aggccccgaaggcggtgtatg

SEQ ID NO: 15104 - DNA, 21 bp, Artificial Sequence
  Target HLA Sequence complement
ggccccgaaggcggtgtatgg

SEQ ID NO: 15105 - DNA, 21 bp, Artificial Sequence
  Target HLA Sequence complement
gccccgaaggcggtgtatgga

SEQ ID NO: 15106 - DNA, 21 bp, Artificial Sequence
  Target HLA Sequence complement
ccccgaaggcggtgtatggat

SEQ ID NO: 15107 - DNA, 21 bp, Artificial Sequence
  Target HLA Sequence complement
ggcggtgtatggattggggag

SEQ ID NO: 15108 - DNA, 21 bp, Artificial Sequence
  Target HLA Sequence complement
atggattggggagtcccagcc

SEQ ID NO: 15109 - DNA, 21 bp, Artificial Sequence
  Target HLA Sequence complement
tggattggggagtcccagcct

SEQ ID NO: 15110 - DNA, 21 bp, Artificial Sequence
  Target HLA Sequence complement
ggattggggagtcccagcctt

SEQ ID NO: 15111 - DNA, 21 bp, Artificial Sequence
  Target HLA Sequence complement
gattggggagtcccagccttg

SEQ ID NO: 15112 - DNA, 21 bp, Artificial Sequence
  Target HLA Sequence complement
attggggagtcccagccttgg

SEQ ID NO: 15113 - DNA, 21 bp, Artificial Sequence
  Target HLA Sequence complement
ttggggagtcccagccttggg

SEQ ID NO: 15114 - DNA, 21 bp, Artificial Sequence
  Target HLA Sequence complement
tggggagtcccagccttgggg

SEQ ID NO: 15115 - DNA, 21 bp, Artificial Sequence
  Target HLA Sequence complement
ggggagtcccagccttgggga

SEQ ID NO: 15116 - DNA, 21 bp, Artificial Sequence
  Target HLA Sequence complement
gggagtcccagccttggggat

SEQ ID NO: 15117 - DNA, 21 bp, Artificial Sequence
  Target HLA Sequence complement
ggagtcccagccttggggatt

SEQ ID NO: 15118 - DNA, 21 bp, Artificial Sequence
  Target HLA Sequence complement
gagtcccagccttggggattc

SEQ ID NO: 15119 - DNA, 21 bp, Artificial Sequence
  Target HLA Sequence complement
agtcccagccttggggattcc

SEQ ID NO: 15120 - DNA, 21 bp, Artificial Sequence
  Target HLA Sequence complement
gtcccagccttggggattccc

SEQ ID NO: 15121 - DNA, 21 bp, Artificial Sequence
  Target HLA Sequence complement
tcccagccttggggattcccc

SEQ ID NO: 15122 - DNA, 21 bp, Artificial Sequence
  Target HLA Sequence complement
cccagccttggggattcccca

SEQ ID NO: 15123 - DNA, 21 bp, Artificial Sequence
  Target HLA Sequence complement
ccagccttggggattccccaa

SEQ ID NO: 15124 - DNA, 21 bp, Artificial Sequence
  Target HLA Sequence complement
cagccttggggattccccaac

SEQ ID NO: 15125 - DNA, 21 bp, Artificial Sequence
  Target HLA Sequence complement
gccttggggattccccaactc

SEQ ID NO: 15126 - DNA, 21 bp, Artificial Sequence
  Target HLA Sequence complement
ccttggggattccccaactcc

SEQ ID NO: 15127 - DNA, 21 bp, Artificial Sequence
  Target HLA Sequence complement
cttggggattccccaactccg

SEQ ID NO: 15128 - DNA, 21 bp, Artificial Sequence
  Target HLA Sequence complement
ttggggattccccaactccgc

SEQ ID NO: 15129 - DNA, 21 bp, Artificial Sequence
  Target HLA Sequence complement
tggggattccccaactccgca

SEQ ID NO: 15130 - DNA, 21 bp, Artificial Sequence
  Target HLA Sequence complement
ggggattccccaactccgcag

SEQ ID NO: 15131 - DNA, 21 bp, Artificial Sequence
  Target HLA Sequence complement
gggattccccaactccgcagt

SEQ ID NO: 15132 - DNA, 21 bp, Artificial Sequence
  Target HLA Sequence complement
tcctggatactcacgacgcgg

SEQ ID NO: 15133 - DNA, 21 bp, Artificial Sequence
  Target HLA Sequence complement
cctggatactcacgacgcgga

SEQ ID NO: 15134 - DNA, 21 bp, Artificial Sequence
  Target HLA Sequence complement
ctggatactcacgacgcggac

SEQ ID NO: 15135 - DNA, 21 bp, Artificial Sequence
  Target HLA Sequence complement
tggatactcacgacgcggacc

SEQ ID NO: 15136 - DNA, 21 bp, Artificial Sequence
  Target HLA Sequence complement
ggatactcacgacgcggaccc

SEQ ID NO: 15137 - DNA, 21 bp, Artificial Sequence
  Target HLA Sequence complement
gatactcacgacgcggaccca

SEQ ID NO: 15138 - DNA, 21 bp, Artificial Sequence
  Target HLA Sequence complement
atactcacgacgcggacccag

SEQ ID NO: 15139 - DNA, 21 bp, Artificial Sequence
  Target HLA Sequence complement
tactcacgacgcggacccagt

SEQ ID NO: 15140 - DNA, 21 bp, Artificial Sequence
  Target HLA Sequence complement
actcacgacgcggacccagtt

SEQ ID NO: 15141 - DNA, 21 bp, Artificial Sequence
  Target HLA Sequence complement
ctcacgacgcggacccagttc

SEQ ID NO: 15142 - DNA, 21 bp, Artificial Sequence
  Target HLA Sequence complement
tcacgacgcggacccagttct

SEQ ID NO: 15143 - DNA, 21 bp, Artificial Sequence
  Target HLA Sequence complement
cacgacgcggacccagttctc

SEQ ID NO: 15144 - DNA, 21 bp, Artificial Sequence
  Target HLA Sequence complement
acgacgcggacccagttctca

SEQ ID NO: 15145 - DNA, 21 bp, Artificial Sequence
  Target HLA Sequence complement
cgacgcggacccagttctcac

SEQ ID NO: 15146 - DNA, 21 bp, Artificial Sequence
  Target HLA Sequence complement
gacgcggacccagttctcact

SEQ ID NO: 15147 - DNA, 21 bp, Artificial Sequence
  Target HLA Sequence complement
acgcggacccagttctcactc

SEQ ID NO: 15148 - DNA, 21 bp, Artificial Sequence
  Target HLA Sequence complement
cgcggacccagttctcactcc

SEQ ID NO: 15149 - DNA, 21 bp, Artificial Sequence
  Target HLA Sequence complement
gcggacccagttctcactccc

SEQ ID NO: 15150 - DNA, 21 bp, Artificial Sequence
  Target HLA Sequence complement
cggacccagttctcactccca

SEQ ID NO: 15151 - DNA, 21 bp, Artificial Sequence
  Target HLA Sequence complement
ctcactcccattgggtgtcgg

SEQ ID NO: 15152 - DNA, 21 bp, Artificial Sequence
  Target HLA Sequence complement
tcactcccattgggtgtcggg

SEQ ID NO: 15153 - DNA, 21 bp, Artificial Sequence
  Target HLA Sequence complement
cactcccattgggtgtcgggt

SEQ ID NO: 15154 - DNA, 21 bp, Artificial Sequence
  Target HLA Sequence complement
cccattgggtgtcgggtttcc

SEQ ID NO: 15155 - DNA, 21 bp, Artificial Sequence
  Target HLA Sequence complement
agccaatcagtgtcgtcgcgg

SEQ ID NO: 15156 - DNA, 21 bp, Artificial Sequence
  Target HLA Sequence complement
gccaatcagtgtcgtcgcggt

SEQ ID NO: 15157 - DNA, 21 bp, Artificial Sequence
  Target HLA Sequence complement
ccaatcagtgtcgtcgcggtc

SEQ ID NO: 15158 - DNA, 21 bp, Artificial Sequence
  Target HLA Sequence complement
caatcagtgtcgtcgcggtcg

SEQ ID NO: 15159 - DNA, 21 bp, Artificial Sequence
  Target HLA Sequence complement
aatcagtgtcgtcgcggtcgc

SEQ ID NO: 15160 - DNA, 21 bp, Artificial Sequence
  Target HLA Sequence complement
atcagtgtcgtcgcggtcgcg

SEQ ID NO: 15161 - DNA, 21 bp, Artificial Sequence
  Target HLA Sequence complement
tcagtgtcgtcgcggtcgcgg

SEQ ID NO: 15162 - DNA, 21 bp, Artificial Sequence
  Target HLA Sequence complement
cagtgtcgtcgcggtcgcggt

SEQ ID NO: 15163 - DNA, 21 bp, Artificial Sequence
  Target HLA Sequence complement
agtgtcgtcgcggtcgcggtt

SEQ ID NO: 15164 - DNA, 21 bp, Artificial Sequence
  Target HLA Sequence complement
gtgtcgtcgcggtcgcggttc

SEQ ID NO: 15165 - DNA, 21 bp, Artificial Sequence
  Target HLA Sequence complement
tgtcgtcgcggtcgcggttct

SEQ ID NO: 15166 - DNA, 21 bp, Artificial Sequence
  Target HLA Sequence complement
gtcgtcgcggtcgcggttcta

SEQ ID NO: 15167 - DNA, 21 bp, Artificial Sequence
  Target HLA Sequence complement
tcgtcgcggtcgcggttctaa

SEQ ID NO: 15168 - DNA, 21 bp, Artificial Sequence
  Target HLA Sequence complement
cgtcgcggtcgcggttctaaa

SEQ ID NO: 15169 - DNA, 21 bp, Artificial Sequence
  Target HLA Sequence complement
gtcgcggtcgcggttctaaag

SEQ ID NO: 15170 - DNA, 21 bp, Artificial Sequence
  Target HLA Sequence complement
cgcggtcgcggttctaaagtc

SEQ ID NO: 15171 - DNA, 21 bp, Artificial Sequence
  Target HLA Sequence complement
gcggtcgcggttctaaagtcc

SEQ ID NO: 15172 - DNA, 21 bp, Artificial Sequence
  Target HLA Sequence complement
cggtcgcggttctaaagtccg

SEQ ID NO: 15173 - DNA, 21 bp, Artificial Sequence
  Target HLA Sequence complement
ggtcgcggttctaaagtccgc

SEQ ID NO: 15174 - DNA, 21 bp, Artificial Sequence
  Target HLA Sequence complement
cgcggttctaaagtccgcacg

SEQ ID NO: 15175 - DNA, 21 bp, Artificial Sequence
  Target HLA Sequence complement
gcggttctaaagtccgcacgc

SEQ ID NO: 15176 - DNA, 21 bp, Artificial Sequence
  Target HLA Sequence complement
ctaaagtccgcacgcacccac

SEQ ID NO: 15177 - DNA, 21 bp, Artificial Sequence
  Target HLA Sequence complement
taaagtccgcacgcacccacc

SEQ ID NO: 15178 - DNA, 21 bp, Artificial Sequence
  Target HLA Sequence complement
aaagtccgcacgcacccaccg

SEQ ID NO: 15179 - DNA, 21 bp, Artificial Sequence
  Target HLA Sequence complement
aagtccgcacgcacccaccgg

SEQ ID NO: 15180 - DNA, 21 bp, Artificial Sequence
  Target HLA Sequence complement
agtccgcacgcacccaccggg

SEQ ID NO: 15181 - DNA, 21 bp, Artificial Sequence
  Target HLA Sequence complement
gtccgcacgcacccaccggga

SEQ ID NO: 15182 - DNA, 21 bp, Artificial Sequence
  Target HLA Sequence complement
tccgcacgcacccaccgggac

SEQ ID NO: 15183 - DNA, 21 bp, Artificial Sequence
  Target HLA Sequence complement
ccgcacgcacccaccgggact

SEQ ID NO: 15184 - DNA, 21 bp, Artificial Sequence
  Target HLA Sequence complement
cgcacgcacccaccgggactc

SEQ ID NO: 15185 - DNA, 21 bp, Artificial Sequence
  Target HLA Sequence complement
gcacgcacccaccgggactca

SEQ ID NO: 15186 - DNA, 21 bp, Artificial Sequence
  Target HLA Sequence complement
cacgcacccaccgggactcag

SEQ ID NO: 15187 - DNA, 21 bp, Artificial Sequence
  Target HLA Sequence complement
acgcacccaccgggactcaga

SEQ ID NO: 15188 - DNA, 21 bp, Artificial Sequence
  Target HLA Sequence complement
cgcacccaccgggactcagat

SEQ ID NO: 15189 - DNA, 21 bp, Artificial Sequence
  Target HLA Sequence complement
gcacccaccgggactcagatt

SEQ ID NO: 15190 - DNA, 21 bp, Artificial Sequence
  Target HLA Sequence complement
cacccaccgggactcagattc

SEQ ID NO: 15191 - DNA, 21 bp, Artificial Sequence
  Target HLA Sequence complement
cccaccgggactcagattctc

SEQ ID NO: 15192 - DNA, 21 bp, Artificial Sequence
  Target HLA Sequence complement
ccaccgggactcagattctcc

SEQ ID NO: 15193 - DNA, 21 bp, Artificial Sequence
  Target HLA Sequence complement
caccgggactcagattctccc

SEQ ID NO: 15194 - DNA, 21 bp, Artificial Sequence
  Target HLA Sequence complement
accgggactcagattctcccc

SEQ ID NO: 15195 - DNA, 21 bp, Artificial Sequence
  Target HLA Sequence complement
ccgggactcagattctcccca

SEQ ID NO: 15196 - DNA, 21 bp, Artificial Sequence
  Target HLA Sequence complement
cgggactcagattctccccag

SEQ ID NO: 15197 - DNA, 21 bp, Artificial Sequence
  Target HLA Sequence complement
ctcagattctccccagacgcc

SEQ ID NO: 15198 - DNA, 21 bp, Artificial Sequence
  Target HLA Sequence complement
tcagattctccccagacgccg

SEQ ID NO: 15199 - DNA, 21 bp, Artificial Sequence
  Target HLA Sequence complement
cagattctccccagacgccga

SEQ ID NO: 15200 - DNA, 21 bp, Artificial Sequence
  Target HLA Sequence complement
agattctccccagacgccgag

SEQ ID NO: 15201 - DNA, 21 bp, Artificial Sequence
  Target HLA Sequence complement
gattctccccagacgccgagg

SEQ ID NO: 15202 - DNA, 21 bp, Artificial Sequence
  Target HLA Sequence complement
attctccccagacgccgagga

SEQ ID NO: 15203 - DNA, 21 bp, Artificial Sequence
  Target HLA Sequence complement
ttctccccagacgccgaggat

SEQ ID NO: 15204 - DNA, 21 bp, Artificial Sequence
  Target HLA Sequence complement
tctccccagacgccgaggatg

SEQ ID NO: 15205 - DNA, 21 bp, Artificial Sequence
  Target HLA Sequence complement
ctccccagacgccgaggatgg

SEQ ID NO: 15206 - DNA, 21 bp, Artificial Sequence
  Target HLA Sequence complement
tccccagacgccgaggatggc

SEQ ID NO: 15207 - DNA, 21 bp, Artificial Sequence
  Target HLA Sequence complement
ccccagacgccgaggatggcc

SEQ ID NO: 15208 - DNA, 21 bp, Artificial Sequence
  Target HLA Sequence complement
cccagacgccgaggatggccg

SEQ ID NO: 15209 - DNA, 21 bp, Artificial Sequence
  Target HLA Sequence complement
ccagacgccgaggatggccgt

SEQ ID NO: 15210 - DNA, 21 bp, Artificial Sequence
  Target HLA Sequence complement
cagacgccgaggatggccgtc

SEQ ID NO: 15211 - DNA, 21 bp, Artificial Sequence
  Target HLA Sequence complement
agacgccgaggatggccgtca

SEQ ID NO: 15212 - DNA, 21 bp, Artificial Sequence
  Target HLA Sequence complement
gacgccgaggatggccgtcat

SEQ ID NO: 15213 - DNA, 21 bp, Artificial Sequence
  Target HLA Sequence complement
acgccgaggatggccgtcatg

SEQ ID NO: 15214 - DNA, 21 bp, Artificial Sequence
  Target HLA Sequence complement
cgccgaggatggccgtcatgg

SEQ ID NO: 15215 - DNA, 21 bp, Artificial Sequence
  Target HLA Sequence complement
gccgaggatggccgtcatggc

SEQ ID NO: 15216 - DNA, 21 bp, Artificial Sequence
  Target HLA Sequence complement
ccgaggatggccgtcatggcg

SEQ ID NO: 15217 - DNA, 21 bp, Artificial Sequence
  Target HLA Sequence complement
cgaggatggccgtcatggcgc

SEQ ID NO: 15218 - DNA, 21 bp, Artificial Sequence
  Target HLA Sequence complement
gaggatggccgtcatggcgcc

SEQ ID NO: 15219 - DNA, 21 bp, Artificial Sequence
  Target HLA Sequence complement
aggatggccgtcatggcgccc

SEQ ID NO: 15220 - DNA, 21 bp, Artificial Sequence
  Target HLA Sequence complement
ggatggccgtcatggcgcccc

SEQ ID NO: 15221 - DNA, 21 bp, Artificial Sequence
  Target HLA Sequence complement
gatggccgtcatggcgccccg

SEQ ID NO: 15222 - DNA, 21 bp, Artificial Sequence
  Target HLA Sequence complement
atggccgtcatggcgccccga

SEQ ID NO: 15223 - DNA, 21 bp, Artificial Sequence
  Target HLA Sequence complement
tggccgtcatggcgccccgaa

SEQ ID NO: 15224 - DNA, 21 bp, Artificial Sequence
  Target HLA Sequence complement
ggccgtcatggcgccccgaac

SEQ ID NO: 15225 - DNA, 21 bp, Artificial Sequence
  Target HLA Sequence complement
gccgtcatggcgccccgaacc

SEQ ID NO: 15226 - DNA, 21 bp, Artificial Sequence
  Target HLA Sequence complement
ccgtcatggcgccccgaaccc

SEQ ID NO: 15227 - DNA, 21 bp, Artificial Sequence
  Target HLA Sequence complement
cgtcatggcgccccgaaccct

SEQ ID NO: 15228 - DNA, 21 bp, Artificial Sequence
  Target HLA Sequence complement
gtcatggcgccccgaaccctc

SEQ ID NO: 15229 - DNA, 21 bp, Artificial Sequence
  Target HLA Sequence complement
tcatggcgccccgaaccctcg

SEQ ID NO: 15230 - DNA, 21 bp, Artificial Sequence
  Target HLA Sequence complement
catggcgccccgaaccctcgt

SEQ ID NO: 15231 - DNA, 21 bp, Artificial Sequence
  Target HLA Sequence complement
atggcgccccgaaccctcgtc

SEQ ID NO: 15232 - DNA, 21 bp, Artificial Sequence
  Target HLA Sequence complement
tggcgccccgaaccctcgtcc

SEQ ID NO: 15233 - DNA, 21 bp, Artificial Sequence
  Target HLA Sequence complement
ggcgccccgaaccctcgtcct

SEQ ID NO: 15234 - DNA, 21 bp, Artificial Sequence
  Target HLA Sequence complement
gcgccccgaaccctcgtcctg

SEQ ID NO: 15235 - DNA, 21 bp, Artificial Sequence
  Target HLA Sequence complement
cgccccgaaccctcgtcctgc

SEQ ID NO: 15236 - DNA, 21 bp, Artificial Sequence
  Target HLA Sequence complement
gccccgaaccctcgtcctgct

SEQ ID NO: 15237 - DNA, 21 bp, Artificial Sequence
  Target HLA Sequence complement
ccccgaaccctcgtcctgcta

SEQ ID NO: 15238 - DNA, 21 bp, Artificial Sequence
  Target HLA Sequence complement
cccgaaccctcgtcctgctac

SEQ ID NO: 15239 - DNA, 21 bp, Artificial Sequence
  Target HLA Sequence complement
ccgaaccctcgtcctgctact

SEQ ID NO: 15240 - DNA, 21 bp, Artificial Sequence
  Target HLA Sequence complement
cgaaccctcgtcctgctactc

SEQ ID NO: 15241 - DNA, 21 bp, Artificial Sequence
  Target HLA Sequence complement
accctcgtcctgctactctcg

SEQ ID NO: 15242 - DNA, 21 bp, Artificial Sequence
  Target HLA Sequence complement
ccctcgtcctgctactctcgg

SEQ ID NO: 15243 - DNA, 21 bp, Artificial Sequence
  Target HLA Sequence complement
cctcgtcctgctactctcggg

SEQ ID NO: 15244 - DNA, 21 bp, Artificial Sequence
  Target HLA Sequence complement
ctcgtcctgctactctcgggg

SEQ ID NO: 15245 - DNA, 21 bp, Artificial Sequence
  Target HLA Sequence complement
tcgtcctgctactctcggggg

SEQ ID NO: 15246 - DNA, 21 bp, Artificial Sequence
  Target HLA Sequence complement
cgtcctgctactctcgggggc

SEQ ID NO: 15247 - DNA, 21 bp, Artificial Sequence
  Target HLA Sequence complement
gtcctgctactctcgggggct

SEQ ID NO: 15248 - DNA, 21 bp, Artificial Sequence
  Target HLA Sequence complement
tcctgctactctcgggggctc

SEQ ID NO: 15249 - DNA, 21 bp, Artificial Sequence
  Target HLA Sequence complement
cctgctactctcgggggctct

SEQ ID NO: 15250 - DNA, 21 bp, Artificial Sequence
  Target HLA Sequence complement
ctgctactctcgggggctctg

SEQ ID NO: 15251 - DNA, 21 bp, Artificial Sequence
  Target HLA Sequence complement
tgctactctcgggggctctgg

SEQ ID NO: 15252 - DNA, 21 bp, Artificial Sequence
  Target HLA Sequence complement
gctactctcgggggctctggc

SEQ ID NO: 15253 - DNA, 21 bp, Artificial Sequence
  Target HLA Sequence complement
ctactctcgggggctctggcc

SEQ ID NO: 15254 - DNA, 21 bp, Artificial Sequence
  Target HLA Sequence complement
tactctcgggggctctggccc

SEQ ID NO: 15255 - DNA, 21 bp, Artificial Sequence
  Target HLA Sequence complement
actctcgggggctctggccct

SEQ ID NO: 15256 - DNA, 21 bp, Artificial Sequence
  Target HLA Sequence complement
ctctcgggggctctggccctg

SEQ ID NO: 15257 - DNA, 21 bp, Artificial Sequence
  Target HLA Sequence complement
tctcgggggctctggccctga

SEQ ID NO: 15258 - DNA, 21 bp, Artificial Sequence
  Target HLA Sequence complement
ctcgggggctctggccctgac

SEQ ID NO: 15259 - DNA, 21 bp, Artificial Sequence
  Target HLA Sequence complement
tcgggggctctggccctgacc

SEQ ID NO: 15260 - DNA, 21 bp, Artificial Sequence
  Target HLA Sequence complement
cgggggctctggccctgaccc

SEQ ID NO: 15261 - DNA, 21 bp, Artificial Sequence
  Target HLA Sequence complement
gggggctctggccctgaccca

SEQ ID NO: 15262 - DNA, 21 bp, Artificial Sequence
  Target HLA Sequence complement
ggggctctggccctgacccag

SEQ ID NO: 15263 - DNA, 21 bp, Artificial Sequence
  Target HLA Sequence complement
gggctctggccctgacccaga

SEQ ID NO: 15264 - DNA, 21 bp, Artificial Sequence
  Target HLA Sequence complement
ggctctggccctgacccagac

SEQ ID NO: 15265 - DNA, 21 bp, Artificial Sequence
  Target HLA Sequence complement
gctctggccctgacccagacc

SEQ ID NO: 15266 - DNA, 21 bp, Artificial Sequence
  Target HLA Sequence complement
ctctggccctgacccagacct

SEQ ID NO: 15267 - DNA, 21 bp, Artificial Sequence
  Target HLA Sequence complement
tctggccctgacccagacctg

SEQ ID NO: 15268 - DNA, 21 bp, Artificial Sequence
  Target HLA Sequence complement
ctggccctgacccagacctgg

SEQ ID NO: 15269 - DNA, 21 bp, Artificial Sequence
  Target HLA Sequence complement
tggccctgacccagacctggg

SEQ ID NO: 15270 - DNA, 21 bp, Artificial Sequence
  Target HLA Sequence complement
ggccctgacccagacctgggc

SEQ ID NO: 15271 - DNA, 21 bp, Artificial Sequence
  Target HLA Sequence complement
gccctgacccagacctgggcg

SEQ ID NO: 15272 - DNA, 21 bp, Artificial Sequence
  Target HLA Sequence complement
ccctgacccagacctgggcgg

SEQ ID NO: 15273 - DNA, 21 bp, Artificial Sequence
  Target HLA Sequence complement
cctgacccagacctgggcggg

SEQ ID NO: 15274 - DNA, 21 bp, Artificial Sequence
  Target HLA Sequence complement
ctgacccagacctgggcgggc

SEQ ID NO: 15275 - DNA, 21 bp, Artificial Sequence
  Target HLA Sequence complement
tgacccagacctgggcgggct

SEQ ID NO: 15276 - DNA, 21 bp, Artificial Sequence
  Target HLA Sequence complement
gacccagacctgggcgggctc

SEQ ID NO: 15277 - DNA, 21 bp, Artificial Sequence
  Target HLA Sequence complement
acccagacctgggcgggctct

SEQ ID NO: 15278 - DNA, 21 bp, Artificial Sequence
  Target HLA Sequence complement
cccagacctgggcgggctctc

SEQ ID NO: 15279 - DNA, 21 bp, Artificial Sequence
  Target HLA Sequence complement
ccagacctgggcgggctctca

SEQ ID NO: 15280 - DNA, 21 bp, Artificial Sequence
  Target HLA Sequence complement
cagacctgggcgggctctcac

SEQ ID NO: 15281 - DNA, 21 bp, Artificial Sequence
  Target HLA Sequence complement
agacctgggcgggctctcact

SEQ ID NO: 15282 - DNA, 21 bp, Artificial Sequence
  Target HLA Sequence complement
gacctgggcgggctctcactc

SEQ ID NO: 15283 - DNA, 21 bp, Artificial Sequence
  Target HLA Sequence complement
acctgggcgggctctcactcc

SEQ ID NO: 15284 - DNA, 21 bp, Artificial Sequence
  Target HLA Sequence complement
cctgggcgggctctcactcca

SEQ ID NO: 15285 - DNA, 21 bp, Artificial Sequence
  Target HLA Sequence complement
ctgggcgggctctcactccat

SEQ ID NO: 15286 - DNA, 21 bp, Artificial Sequence
  Target HLA Sequence complement
tgggcgggctctcactccatg

SEQ ID NO: 15287 - DNA, 21 bp, Artificial Sequence
  Target HLA Sequence complement
gggcgggctctcactccatga

SEQ ID NO: 15288 - DNA, 21 bp, Artificial Sequence
  Target HLA Sequence complement
ggcgggctctcactccatgag

SEQ ID NO: 15289 - DNA, 21 bp, Artificial Sequence
  Target HLA Sequence complement
gcgggctctcactccatgagg

SEQ ID NO: 15290 - DNA, 21 bp, Artificial Sequence
  Target HLA Sequence complement
cgggctctcactccatgaggt

SEQ ID NO: 15291 - DNA, 21 bp, Artificial Sequence
  Target HLA Sequence complement
tcttcacatccgtgtcccggc

SEQ ID NO: 15292 - DNA, 21 bp, Artificial Sequence
  Target HLA Sequence complement
cttcacatccgtgtcccggcc

SEQ ID NO: 15293 - DNA, 21 bp, Artificial Sequence
  Target HLA Sequence complement
ttcacatccgtgtcccggccc

SEQ ID NO: 15294 - DNA, 21 bp, Artificial Sequence
  Target HLA Sequence complement
tcacatccgtgtcccggcccg

SEQ ID NO: 15295 - DNA, 21 bp, Artificial Sequence
  Target HLA Sequence complement
cacatccgtgtcccggcccgg

SEQ ID NO: 15296 - DNA, 21 bp, Artificial Sequence
  Target HLA Sequence complement
acatccgtgtcccggcccggc

SEQ ID NO: 15297 - DNA, 21 bp, Artificial Sequence
  Target HLA Sequence complement
catccgtgtcccggcccggcc

SEQ ID NO: 15298 - DNA, 21 bp, Artificial Sequence
  Target HLA Sequence complement
atccgtgtcccggcccggccg

SEQ ID NO: 15299 - DNA, 21 bp, Artificial Sequence
  Target HLA Sequence complement
tccgtgtcccggcccggccgc

SEQ ID NO: 15300 - DNA, 21 bp, Artificial Sequence
  Target HLA Sequence complement
ccgtgtcccggcccggccgcg

SEQ ID NO: 15301 - DNA, 21 bp, Artificial Sequence
  Target HLA Sequence complement
cgtgtcccggcccggccgcgg

SEQ ID NO: 15302 - DNA, 21 bp, Artificial Sequence
  Target HLA Sequence complement
gtgtcccggcccggccgcggg

SEQ ID NO: 15303 - DNA, 21 bp, Artificial Sequence
  Target HLA Sequence complement
tgtcccggcccggccgcgggg

SEQ ID NO: 15304 - DNA, 21 bp, Artificial Sequence
  Target HLA Sequence complement
gtcccggcccggccgcgggga

SEQ ID NO: 15305 - DNA, 21 bp, Artificial Sequence
  Target HLA Sequence complement
tcccggcccggccgcggggag

SEQ ID NO: 15306 - DNA, 21 bp, Artificial Sequence
  Target HLA Sequence complement
cccggcccggccgcggggagc

SEQ ID NO: 15307 - DNA, 21 bp, Artificial Sequence
  Target HLA Sequence complement
ccggcccggccgcggggagcc

SEQ ID NO: 15308 - DNA, 21 bp, Artificial Sequence
  Target HLA Sequence complement
cggcccggccgcggggagccc

SEQ ID NO: 15309 - DNA, 21 bp, Artificial Sequence
  Target HLA Sequence complement
ggcccggccgcggggagcccc

SEQ ID NO: 15310 - DNA, 21 bp, Artificial Sequence
  Target HLA Sequence complement
gcccggccgcggggagccccg

SEQ ID NO: 15311 - DNA, 21 bp, Artificial Sequence
  Target HLA Sequence complement
cccggccgcggggagccccgc

SEQ ID NO: 15312 - DNA, 21 bp, Artificial Sequence
  Target HLA Sequence complement
ccggccgcggggagccccgct

SEQ ID NO: 15313 - DNA, 21 bp, Artificial Sequence
  Target HLA Sequence complement
cggccgcggggagccccgctt

SEQ ID NO: 15314 - DNA, 21 bp, Artificial Sequence
  Target HLA Sequence complement
ggccgcggggagccccgcttc

SEQ ID NO: 15315 - DNA, 21 bp, Artificial Sequence
  Target HLA Sequence complement
gccgcggggagccccgcttca

SEQ ID NO: 15316 - DNA, 21 bp, Artificial Sequence
  Target HLA Sequence complement
ccgcggggagccccgcttcat

SEQ ID NO: 15317 - DNA, 21 bp, Artificial Sequence
  Target HLA Sequence complement
cgcggggagccccgcttcatc

SEQ ID NO: 15318 - DNA, 21 bp, Artificial Sequence
  Target HLA Sequence complement
gcggggagccccgcttcatcg

SEQ ID NO: 15319 - DNA, 21 bp, Artificial Sequence
  Target HLA Sequence complement
cggggagccccgcttcatcgc

SEQ ID NO: 15320 - DNA, 21 bp, Artificial Sequence
  Target HLA Sequence complement
ggggagccccgcttcatcgca

SEQ ID NO: 15321 - DNA, 21 bp, Artificial Sequence
  Target HLA Sequence complement
gggagccccgcttcatcgcag

SEQ ID NO: 15322 - DNA, 21 bp, Artificial Sequence
  Target HLA Sequence complement
ggagccccgcttcatcgcagt

SEQ ID NO: 15323 - DNA, 21 bp, Artificial Sequence
  Target HLA Sequence complement
gagccccgcttcatcgcagtg

SEQ ID NO: 15324 - DNA, 21 bp, Artificial Sequence
  Target HLA Sequence complement
agccccgcttcatcgcagtgg

SEQ ID NO: 15325 - DNA, 21 bp, Artificial Sequence
  Target HLA Sequence complement
gccccgcttcatcgcagtggg

SEQ ID NO: 15326 - DNA, 21 bp, Artificial Sequence
  Target HLA Sequence complement
ccccgcttcatcgcagtgggc

SEQ ID NO: 15327 - DNA, 21 bp, Artificial Sequence
  Target HLA Sequence complement
cccgcttcatcgcagtgggct

SEQ ID NO: 15328 - DNA, 21 bp, Artificial Sequence
  Target HLA Sequence complement
ccgcttcatcgcagtgggcta

SEQ ID NO: 15329 - DNA, 21 bp, Artificial Sequence
  Target HLA Sequence complement
cgcttcatcgcagtgggctac

SEQ ID NO: 15330 - DNA, 21 bp, Artificial Sequence
  Target HLA Sequence complement
gcttcatcgcagtgggctacg

SEQ ID NO: 15331 - DNA, 21 bp, Artificial Sequence
  Target HLA Sequence complement
tcatcgcagtgggctacgtgg

SEQ ID NO: 15332 - DNA, 21 bp, Artificial Sequence
  Target HLA Sequence complement
catcgcagtgggctacgtgga

SEQ ID NO: 15333 - DNA, 21 bp, Artificial Sequence
  Target HLA Sequence complement
atcgcagtgggctacgtggac

SEQ ID NO: 15334 - DNA, 21 bp, Artificial Sequence
  Target HLA Sequence complement
tcgcagtgggctacgtggacg

SEQ ID NO: 15335 - DNA, 21 bp, Artificial Sequence
  Target HLA Sequence complement
cgcagtgggctacgtggacga

SEQ ID NO: 15336 - DNA, 21 bp, Artificial Sequence
  Target HLA Sequence complement
gcagtgggctacgtggacgac

SEQ ID NO: 15337 - DNA, 21 bp, Artificial Sequence
  Target HLA Sequence complement
cagtgggctacgtggacgaca

SEQ ID NO: 15338 - DNA, 21 bp, Artificial Sequence
  Target HLA Sequence complement
agtgggctacgtggacgacac

SEQ ID NO: 15339 - DNA, 21 bp, Artificial Sequence
  Target HLA Sequence complement
gtgggctacgtggacgacacg

SEQ ID NO: 15340 - DNA, 21 bp, Artificial Sequence
  Target HLA Sequence complement
tgggctacgtggacgacacgc

SEQ ID NO: 15341 - DNA, 21 bp, Artificial Sequence
  Target HLA Sequence complement
gggctacgtggacgacacgca

SEQ ID NO: 15342 - DNA, 21 bp, Artificial Sequence
  Target HLA Sequence complement
ggctacgtggacgacacgcag

SEQ ID NO: 15343 - DNA, 21 bp, Artificial Sequence
  Target HLA Sequence complement
gctacgtggacgacacgcagt

SEQ ID NO: 15344 - DNA, 21 bp, Artificial Sequence
  Target HLA Sequence complement
acgtggacgacacgcagttcg

SEQ ID NO: 15345 - DNA, 21 bp, Artificial Sequence
  Target HLA Sequence complement
cgtggacgacacgcagttcgt

SEQ ID NO: 15346 - DNA, 21 bp, Artificial Sequence
  Target HLA Sequence complement
gtggacgacacgcagttcgtg

SEQ ID NO: 15347 - DNA, 21 bp, Artificial Sequence
  Target HLA Sequence complement
tggacgacacgcagttcgtgc

SEQ ID NO: 15348 - DNA, 21 bp, Artificial Sequence
  Target HLA Sequence complement
ggacgacacgcagttcgtgcg

SEQ ID NO: 15349 - DNA, 21 bp, Artificial Sequence
  Target HLA Sequence complement
gacgacacgcagttcgtgcgg

SEQ ID NO: 15350 - DNA, 21 bp, Artificial Sequence
  Target HLA Sequence complement
acgacacgcagttcgtgcggt

SEQ ID NO: 15351 - DNA, 21 bp, Artificial Sequence
  Target HLA Sequence complement
cgacacgcagttcgtgcggtt

SEQ ID NO: 15352 - DNA, 21 bp, Artificial Sequence
  Target HLA Sequence complement
gacacgcagttcgtgcggttc

SEQ ID NO: 15353 - DNA, 21 bp, Artificial Sequence
  Target HLA Sequence complement
acacgcagttcgtgcggttcg

SEQ ID NO: 15354 - DNA, 21 bp, Artificial Sequence
  Target HLA Sequence complement
cacgcagttcgtgcggttcga

SEQ ID NO: 15355 - DNA, 21 bp, Artificial Sequence
  Target HLA Sequence complement
acgcagttcgtgcggttcgac

SEQ ID NO: 15356 - DNA, 21 bp, Artificial Sequence
  Target HLA Sequence complement
cgcagttcgtgcggttcgaca

SEQ ID NO: 15357 - DNA, 21 bp, Artificial Sequence
  Target HLA Sequence complement
gcagttcgtgcggttcgacag

SEQ ID NO: 15358 - DNA, 21 bp, Artificial Sequence
  Target HLA Sequence complement
cagttcgtgcggttcgacagc

SEQ ID NO: 15359 - DNA, 21 bp, Artificial Sequence
  Target HLA Sequence complement
agttcgtgcggttcgacagcg

SEQ ID NO: 15360 - DNA, 21 bp, Artificial Sequence
  Target HLA Sequence complement
gttcgtgcggttcgacagcga

SEQ ID NO: 15361 - DNA, 21 bp, Artificial Sequence
  Target HLA Sequence complement
ttcgtgcggttcgacagcgac

SEQ ID NO: 15362 - DNA, 21 bp, Artificial Sequence
  Target HLA Sequence complement
tcgtgcggttcgacagcgacg

SEQ ID NO: 15363 - DNA, 21 bp, Artificial Sequence
  Target HLA Sequence complement
cgtgcggttcgacagcgacgc

SEQ ID NO: 15364 - DNA, 21 bp, Artificial Sequence
  Target HLA Sequence complement
gtgcggttcgacagcgacgcc

SEQ ID NO: 15365 - DNA, 21 bp, Artificial Sequence
  Target HLA Sequence complement
tgcggttcgacagcgacgccg

SEQ ID NO: 15366 - DNA, 21 bp, Artificial Sequence
  Target HLA Sequence complement
gcggttcgacagcgacgccgc

SEQ ID NO: 15367 - DNA, 21 bp, Artificial Sequence
  Target HLA Sequence complement
cggttcgacagcgacgccgcg

SEQ ID NO: 15368 - DNA, 21 bp, Artificial Sequence
  Target HLA Sequence complement
ggttcgacagcgacgccgcga

SEQ ID NO: 15369 - DNA, 21 bp, Artificial Sequence
  Target HLA Sequence complement
gttcgacagcgacgccgcgag

SEQ ID NO: 15370 - DNA, 21 bp, Artificial Sequence
  Target HLA Sequence complement
ttcgacagcgacgccgcgagc

SEQ ID NO: 15371 - DNA, 21 bp, Artificial Sequence
  Target HLA Sequence complement
tcgacagcgacgccgcgagcc

SEQ ID NO: 15372 - DNA, 21 bp, Artificial Sequence
  Target HLA Sequence complement
cgacagcgacgccgcgagcca

SEQ ID NO: 15373 - DNA, 21 bp, Artificial Sequence
  Target HLA Sequence complement
gacagcgacgccgcgagccag

SEQ ID NO: 15374 - DNA, 21 bp, Artificial Sequence
  Target HLA Sequence complement
acagcgacgccgcgagccaga

SEQ ID NO: 15375 - DNA, 21 bp, Artificial Sequence
  Target HLA Sequence complement
cagcgacgccgcgagccagag

SEQ ID NO: 15376 - DNA, 21 bp, Artificial Sequence
  Target HLA Sequence complement
agcgacgccgcgagccagagg

SEQ ID NO: 15377 - DNA, 21 bp, Artificial Sequence
  Target HLA Sequence complement
gcgacgccgcgagccagagga

SEQ ID NO: 15378 - DNA, 21 bp, Artificial Sequence
  Target HLA Sequence complement
cgacgccgcgagccagaggat

SEQ ID NO: 15379 - DNA, 21 bp, Artificial Sequence
  Target HLA Sequence complement
gacgccgcgagccagaggatg

SEQ ID NO: 15380 - DNA, 21 bp, Artificial Sequence
  Target HLA Sequence complement
acgccgcgagccagaggatgg

SEQ ID NO: 15381 - DNA, 21 bp, Artificial Sequence
  Target HLA Sequence complement
cgccgcgagccagaggatgga

SEQ ID NO: 15382 - DNA, 21 bp, Artificial Sequence
  Target HLA Sequence complement
gccgcgagccagaggatggag

SEQ ID NO: 15383 - DNA, 21 bp, Artificial Sequence
  Target HLA Sequence complement
ccgcgagccagaggatggagc

SEQ ID NO: 15384 - DNA, 21 bp, Artificial Sequence
  Target HLA Sequence complement
cgcgagccagaggatggagcc

SEQ ID NO: 15385 - DNA, 21 bp, Artificial Sequence
  Target HLA Sequence complement
gcgagccagaggatggagccg

SEQ ID NO: 15386 - DNA, 21 bp, Artificial Sequence
  Target HLA Sequence complement
cgagccagaggatggagccgc

SEQ ID NO: 15387 - DNA, 21 bp, Artificial Sequence
  Target HLA Sequence complement
gagccagaggatggagccgcg

SEQ ID NO: 15388 - DNA, 21 bp, Artificial Sequence
  Target HLA Sequence complement
agccagaggatggagccgcgg

SEQ ID NO: 15389 - DNA, 21 bp, Artificial Sequence
  Target HLA Sequence complement
gccagaggatggagccgcggg

SEQ ID NO: 15390 - DNA, 21 bp, Artificial Sequence
  Target HLA Sequence complement
ccagaggatggagccgcgggc

SEQ ID NO: 15391 - DNA, 21 bp, Artificial Sequence
  Target HLA Sequence complement
cagaggatggagccgcgggcg

SEQ ID NO: 15392 - DNA, 21 bp, Artificial Sequence
  Target HLA Sequence complement
agaggatggagccgcgggcgc

SEQ ID NO: 15393 - DNA, 21 bp, Artificial Sequence
  Target HLA Sequence complement
gaggatggagccgcgggcgcc

SEQ ID NO: 15394 - DNA, 21 bp, Artificial Sequence
  Target HLA Sequence complement
aggatggagccgcgggcgccg

SEQ ID NO: 15395 - DNA, 21 bp, Artificial Sequence
  Target HLA Sequence complement
ggatggagccgcgggcgccgt

SEQ ID NO: 15396 - DNA, 21 bp, Artificial Sequence
  Target HLA Sequence complement
gatggagccgcgggcgccgtg

SEQ ID NO: 15397 - DNA, 21 bp, Artificial Sequence
  Target HLA Sequence complement
atggagccgcgggcgccgtgg

SEQ ID NO: 15398 - DNA, 21 bp, Artificial Sequence
  Target HLA Sequence complement
tggagccgcgggcgccgtgga

SEQ ID NO: 15399 - DNA, 21 bp, Artificial Sequence
  Target HLA Sequence complement
ggagccgcgggcgccgtggat

SEQ ID NO: 15400 - DNA, 21 bp, Artificial Sequence
  Target HLA Sequence complement
gagccgcgggcgccgtggata

SEQ ID NO: 15401 - DNA, 21 bp, Artificial Sequence
  Target HLA Sequence complement
agccgcgggcgccgtggatag

SEQ ID NO: 15402 - DNA, 21 bp, Artificial Sequence
  Target HLA Sequence complement
gccgcgggcgccgtggataga

SEQ ID NO: 15403 - DNA, 21 bp, Artificial Sequence
  Target HLA Sequence complement
ccgcgggcgccgtggatagag

SEQ ID NO: 15404 - DNA, 21 bp, Artificial Sequence
  Target HLA Sequence complement
cgcgggcgccgtggatagagc

SEQ ID NO: 15405 - DNA, 21 bp, Artificial Sequence
  Target HLA Sequence complement
gcgggcgccgtggatagagca

SEQ ID NO: 15406 - DNA, 21 bp, Artificial Sequence
  Target HLA Sequence complement
cgggcgccgtggatagagcag

SEQ ID NO: 15407 - DNA, 21 bp, Artificial Sequence
  Target HLA Sequence complement
gggcgccgtggatagagcagg

SEQ ID NO: 15408 - DNA, 21 bp, Artificial Sequence
  Target HLA Sequence complement
ggcgccgtggatagagcagga

SEQ ID NO: 15409 - DNA, 21 bp, Artificial Sequence
  Target HLA Sequence complement
gcgccgtggatagagcaggag

SEQ ID NO: 15410 - DNA, 21 bp, Artificial Sequence
  Target HLA Sequence complement
cgccgtggatagagcaggagg

SEQ ID NO: 15411 - DNA, 21 bp, Artificial Sequence
  Target HLA Sequence complement
gccgtggatagagcaggaggg

SEQ ID NO: 15412 - DNA, 21 bp, Artificial Sequence
  Target HLA Sequence complement
ccgtggatagagcaggagggt

SEQ ID NO: 15413 - DNA, 21 bp, Artificial Sequence
  Target HLA Sequence complement
cgtggatagagcaggagggtc

SEQ ID NO: 15414 - DNA, 21 bp, Artificial Sequence
  Target HLA Sequence complement
gtggatagagcaggagggtcc

SEQ ID NO: 15415 - DNA, 21 bp, Artificial Sequence
  Target HLA Sequence complement
tggatagagcaggagggtccg

SEQ ID NO: 15416 - DNA, 21 bp, Artificial Sequence
  Target HLA Sequence complement
ggatagagcaggagggtccgg

SEQ ID NO: 15417 - DNA, 21 bp, Artificial Sequence
  Target HLA Sequence complement
gatagagcaggagggtccgga

SEQ ID NO: 15418 - DNA, 21 bp, Artificial Sequence
  Target HLA Sequence complement
atagagcaggagggtccggag

SEQ ID NO: 15419 - DNA, 21 bp, Artificial Sequence
  Target HLA Sequence complement
tagagcaggagggtccggagt

SEQ ID NO: 15420 - DNA, 21 bp, Artificial Sequence
  Target HLA Sequence complement
agagcaggagggtccggagta

SEQ ID NO: 15421 - DNA, 21 bp, Artificial Sequence
  Target HLA Sequence complement
gagcaggagggtccggagtat

SEQ ID NO: 15422 - DNA, 21 bp, Artificial Sequence
  Target HLA Sequence complement
gcaggagggtccggagtattg

SEQ ID NO: 15423 - DNA, 21 bp, Artificial Sequence
  Target HLA Sequence complement
caggagggtccggagtattgg

SEQ ID NO: 15424 - DNA, 21 bp, Artificial Sequence
  Target HLA Sequence complement
aggagggtccggagtattggg

SEQ ID NO: 15425 - DNA, 21 bp, Artificial Sequence
  Target HLA Sequence complement
ggagggtccggagtattggga

SEQ ID NO: 15426 - DNA, 21 bp, Artificial Sequence
  Target HLA Sequence complement
gagggtccggagtattgggac

SEQ ID NO: 15427 - DNA, 21 bp, Artificial Sequence
  Target HLA Sequence complement
agggtccggagtattgggacg

SEQ ID NO: 15428 - DNA, 21 bp, Artificial Sequence
  Target HLA Sequence complement
gggtccggagtattgggacgg

SEQ ID NO: 15429 - DNA, 21 bp, Artificial Sequence
  Target HLA Sequence complement
ggtccggagtattgggacggg

SEQ ID NO: 15430 - DNA, 21 bp, Artificial Sequence
  Target HLA Sequence complement
gtccggagtattgggacgggg

SEQ ID NO: 15431 - DNA, 21 bp, Artificial Sequence
  Target HLA Sequence complement
tccggagtattgggacgggga

SEQ ID NO: 15432 - DNA, 21 bp, Artificial Sequence
  Target HLA Sequence complement
ccggagtattgggacggggag

SEQ ID NO: 15433 - DNA, 21 bp, Artificial Sequence
  Target HLA Sequence complement
cggagtattgggacggggaga

SEQ ID NO: 15434 - DNA, 21 bp, Artificial Sequence
  Target HLA Sequence complement
ggagtattgggacggggagac

SEQ ID NO: 15435 - DNA, 21 bp, Artificial Sequence
  Target HLA Sequence complement
gtattgggacggggagacacg

SEQ ID NO: 15436 - DNA, 21 bp, Artificial Sequence
  Target HLA Sequence complement
tattgggacggggagacacgg

SEQ ID NO: 15437 - DNA, 21 bp, Artificial Sequence
  Target HLA Sequence complement
attgggacggggagacacgga

SEQ ID NO: 15438 - DNA, 21 bp, Artificial Sequence
  Target HLA Sequence complement
ttgggacggggagacacggaa

SEQ ID NO: 15439 - DNA, 21 bp, Artificial Sequence
  Target HLA Sequence complement
tgggacggggagacacggaaa

SEQ ID NO: 15440 - DNA, 21 bp, Artificial Sequence
  Target HLA Sequence complement
gggacggggagacacggaaag

SEQ ID NO: 15441 - DNA, 21 bp, Artificial Sequence
  Target HLA Sequence complement
ggacggggagacacggaaagt

SEQ ID NO: 15442 - DNA, 21 bp, Artificial Sequence
  Target HLA Sequence complement
gacggggagacacggaaagtg

SEQ ID NO: 15443 - DNA, 21 bp, Artificial Sequence
  Target HLA Sequence complement
aggcccactcacagactcacc

SEQ ID NO: 15444 - DNA, 21 bp, Artificial Sequence
  Target HLA Sequence complement
ggcccactcacagactcaccg

SEQ ID NO: 15445 - DNA, 21 bp, Artificial Sequence
  Target HLA Sequence complement
gcccactcacagactcaccga

SEQ ID NO: 15446 - DNA, 21 bp, Artificial Sequence
  Target HLA Sequence complement
cccactcacagactcaccgag

SEQ ID NO: 15447 - DNA, 21 bp, Artificial Sequence
  Target HLA Sequence complement
cacagactcaccgagtggacc

SEQ ID NO: 15448 - DNA, 21 bp, Artificial Sequence
  Target HLA Sequence complement
cagactcaccgagtggacctg

SEQ ID NO: 15449 - DNA, 21 bp, Artificial Sequence
  Target HLA Sequence complement
agactcaccgagtggacctgg

SEQ ID NO: 15450 - DNA, 21 bp, Artificial Sequence
  Target HLA Sequence complement
gactcaccgagtggacctggg

SEQ ID NO: 15451 - DNA, 21 bp, Artificial Sequence
  Target HLA Sequence complement
actcaccgagtggacctgggg

SEQ ID NO: 15452 - DNA, 21 bp, Artificial Sequence
  Target HLA Sequence complement
ctcaccgagtggacctgggga

SEQ ID NO: 15453 - DNA, 21 bp, Artificial Sequence
  Target HLA Sequence complement
tcaccgagtggacctggggac

SEQ ID NO: 15454 - DNA, 21 bp, Artificial Sequence
  Target HLA Sequence complement
caccgagtggacctggggacc

SEQ ID NO: 15455 - DNA, 21 bp, Artificial Sequence
  Target HLA Sequence complement
accgagtggacctggggaccc

SEQ ID NO: 15456 - DNA, 21 bp, Artificial Sequence
  Target HLA Sequence complement
ccgagtggacctggggaccct

SEQ ID NO: 15457 - DNA, 21 bp, Artificial Sequence
  Target HLA Sequence complement
cgagtggacctggggaccctg

SEQ ID NO: 15458 - DNA, 21 bp, Artificial Sequence
  Target HLA Sequence complement
gagtggacctggggaccctgc

SEQ ID NO: 15459 - DNA, 21 bp, Artificial Sequence
  Target HLA Sequence complement
agtggacctggggaccctgcg

SEQ ID NO: 15460 - DNA, 21 bp, Artificial Sequence
  Target HLA Sequence complement
gtggacctggggaccctgcgc

SEQ ID NO: 15461 - DNA, 21 bp, Artificial Sequence
  Target HLA Sequence complement
tggacctggggaccctgcgcg

SEQ ID NO: 15462 - DNA, 21 bp, Artificial Sequence
  Target HLA Sequence complement
ggacctggggaccctgcgcgg

SEQ ID NO: 15463 - DNA, 21 bp, Artificial Sequence
  Target HLA Sequence complement
gacctggggaccctgcgcggc

SEQ ID NO: 15464 - DNA, 21 bp, Artificial Sequence
  Target HLA Sequence complement
acctggggaccctgcgcggct

SEQ ID NO: 15465 - DNA, 21 bp, Artificial Sequence
  Target HLA Sequence complement
cctggggaccctgcgcggcta

SEQ ID NO: 15466 - DNA, 21 bp, Artificial Sequence
  Target HLA Sequence complement
ctggggaccctgcgcggctac

SEQ ID NO: 15467 - DNA, 21 bp, Artificial Sequence
  Target HLA Sequence complement
tggggaccctgcgcggctact

SEQ ID NO: 15468 - DNA, 21 bp, Artificial Sequence
  Target HLA Sequence complement
ggggaccctgcgcggctacta

SEQ ID NO: 15469 - DNA, 21 bp, Artificial Sequence
  Target HLA Sequence complement
gggaccctgcgcggctactac

SEQ ID NO: 15470 - DNA, 21 bp, Artificial Sequence
  Target HLA Sequence complement
ggaccctgcgcggctactaca

SEQ ID NO: 15471 - DNA, 21 bp, Artificial Sequence
  Target HLA Sequence complement
gaccctgcgcggctactacaa

SEQ ID NO: 15472 - DNA, 21 bp, Artificial Sequence
  Target HLA Sequence complement
accctgcgcggctactacaac

SEQ ID NO: 15473 - DNA, 21 bp, Artificial Sequence
  Target HLA Sequence complement
ccctgcgcggctactacaacc

SEQ ID NO: 15474 - DNA, 21 bp, Artificial Sequence
  Target HLA Sequence complement
cctgcgcggctactacaacca

SEQ ID NO: 15475 - DNA, 21 bp, Artificial Sequence
  Target HLA Sequence complement
ctgcgcggctactacaaccag

SEQ ID NO: 15476 - DNA, 21 bp, Artificial Sequence
  Target HLA Sequence complement
gcgcggctactacaaccagag

SEQ ID NO: 15477 - DNA, 21 bp, Artificial Sequence
  Target HLA Sequence complement
cgcggctactacaaccagagc

SEQ ID NO: 15478 - DNA, 21 bp, Artificial Sequence
  Target HLA Sequence complement
gcggctactacaaccagagcg

SEQ ID NO: 15479 - DNA, 21 bp, Artificial Sequence
  Target HLA Sequence complement
actacaaccagagcgaggccg

SEQ ID NO: 15480 - DNA, 21 bp, Artificial Sequence
  Target HLA Sequence complement
ctacaaccagagcgaggccgg

SEQ ID NO: 15481 - DNA, 21 bp, Artificial Sequence
  Target HLA Sequence complement
tacaaccagagcgaggccggt

SEQ ID NO: 15482 - DNA, 21 bp, Artificial Sequence
  Target HLA Sequence complement
acaaccagagcgaggccggtt

SEQ ID NO: 15483 - DNA, 21 bp, Artificial Sequence
  Target HLA Sequence complement
caaccagagcgaggccggttc

SEQ ID NO: 15484 - DNA, 21 bp, Artificial Sequence
  Target HLA Sequence complement
aaccagagcgaggccggttct

SEQ ID NO: 15485 - DNA, 21 bp, Artificial Sequence
  Target HLA Sequence complement
accagagcgaggccggttctc

SEQ ID NO: 15486 - DNA, 21 bp, Artificial Sequence
  Target HLA Sequence complement
ccagagcgaggccggttctca

SEQ ID NO: 15487 - DNA, 21 bp, Artificial Sequence
  Target HLA Sequence complement
cagagcgaggccggttctcac

SEQ ID NO: 15488 - DNA, 21 bp, Artificial Sequence
  Target HLA Sequence complement
agagcgaggccggttctcaca

SEQ ID NO: 15489 - DNA, 21 bp, Artificial Sequence
  Target HLA Sequence complement
gagcgaggccggttctcacac

SEQ ID NO: 15490 - DNA, 21 bp, Artificial Sequence
  Target HLA Sequence complement
agcgaggccggttctcacacc

SEQ ID NO: 15491 - DNA, 21 bp, Artificial Sequence
  Target HLA Sequence complement
gcgaggccggttctcacaccg

SEQ ID NO: 15492 - DNA, 21 bp, Artificial Sequence
  Target HLA Sequence complement
cgaggccggttctcacaccgt

SEQ ID NO: 15493 - DNA, 21 bp, Artificial Sequence
  Target HLA Sequence complement
gaggccggttctcacaccgtc

SEQ ID NO: 15494 - DNA, 21 bp, Artificial Sequence
  Target HLA Sequence complement
aggccggttctcacaccgtcc

SEQ ID NO: 15495 - DNA, 21 bp, Artificial Sequence
  Target HLA Sequence complement
ggccggttctcacaccgtcca

SEQ ID NO: 15496 - DNA, 21 bp, Artificial Sequence
  Target HLA Sequence complement
gccggttctcacaccgtccag

SEQ ID NO: 15497 - DNA, 21 bp, Artificial Sequence
  Target HLA Sequence complement
ccggttctcacaccgtccaga

SEQ ID NO: 15498 - DNA, 21 bp, Artificial Sequence
  Target HLA Sequence complement
cggttctcacaccgtccagag

SEQ ID NO: 15499 - DNA, 21 bp, Artificial Sequence
  Target HLA Sequence complement
ggttctcacaccgtccagagg

SEQ ID NO: 15500 - DNA, 21 bp, Artificial Sequence
  Target HLA Sequence complement
ggatgtatggctgcgacgtgg

SEQ ID NO: 15501 - DNA, 21 bp, Artificial Sequence
  Target HLA Sequence complement
gatgtatggctgcgacgtggg

SEQ ID NO: 15502 - DNA, 21 bp, Artificial Sequence
  Target HLA Sequence complement
atgtatggctgcgacgtgggg

SEQ ID NO: 15503 - DNA, 21 bp, Artificial Sequence
  Target HLA Sequence complement
tgtatggctgcgacgtggggt

SEQ ID NO: 15504 - DNA, 21 bp, Artificial Sequence
  Target HLA Sequence complement
gtatggctgcgacgtggggtc

SEQ ID NO: 15505 - DNA, 21 bp, Artificial Sequence
  Target HLA Sequence complement
tatggctgcgacgtggggtcg

SEQ ID NO: 15506 - DNA, 21 bp, Artificial Sequence
  Target HLA Sequence complement
atggctgcgacgtggggtcgg

SEQ ID NO: 15507 - DNA, 21 bp, Artificial Sequence
  Target HLA Sequence complement
tggctgcgacgtggggtcgga

SEQ ID NO: 15508 - DNA, 21 bp, Artificial Sequence
  Target HLA Sequence complement
ggctgcgacgtggggtcggac

SEQ ID NO: 15509 - DNA, 21 bp, Artificial Sequence
  Target HLA Sequence complement
gctgcgacgtggggtcggact

SEQ ID NO: 15510 - DNA, 21 bp, Artificial Sequence
  Target HLA Sequence complement
ctgcgacgtggggtcggactg

SEQ ID NO: 15511 - DNA, 21 bp, Artificial Sequence
  Target HLA Sequence complement
tgcgacgtggggtcggactgg

SEQ ID NO: 15512 - DNA, 21 bp, Artificial Sequence
  Target HLA Sequence complement
gcgacgtggggtcggactggc

SEQ ID NO: 15513 - DNA, 21 bp, Artificial Sequence
  Target HLA Sequence complement
cgacgtggggtcggactggcg

SEQ ID NO: 15514 - DNA, 21 bp, Artificial Sequence
  Target HLA Sequence complement
gacgtggggtcggactggcgc

SEQ ID NO: 15515 - DNA, 21 bp, Artificial Sequence
  Target HLA Sequence complement
acgtggggtcggactggcgct

SEQ ID NO: 15516 - DNA, 21 bp, Artificial Sequence
  Target HLA Sequence complement
cgtggggtcggactggcgctt

SEQ ID NO: 15517 - DNA, 21 bp, Artificial Sequence
  Target HLA Sequence complement
gtggggtcggactggcgcttc

SEQ ID NO: 15518 - DNA, 21 bp, Artificial Sequence
  Target HLA Sequence complement
tggggtcggactggcgcttcc

SEQ ID NO: 15519 - DNA, 21 bp, Artificial Sequence
  Target HLA Sequence complement
ggggtcggactggcgcttcct

SEQ ID NO: 15520 - DNA, 21 bp, Artificial Sequence
  Target HLA Sequence complement
gggtcggactggcgcttcctc

SEQ ID NO: 15521 - DNA, 21 bp, Artificial Sequence
  Target HLA Sequence complement
ggtcggactggcgcttcctcc

SEQ ID NO: 15522 - DNA, 21 bp, Artificial Sequence
  Target HLA Sequence complement
gtcggactggcgcttcctccg

SEQ ID NO: 15523 - DNA, 21 bp, Artificial Sequence
  Target HLA Sequence complement
tcggactggcgcttcctccgc

SEQ ID NO: 15524 - DNA, 21 bp, Artificial Sequence
  Target HLA Sequence complement
cggactggcgcttcctccgcg

SEQ ID NO: 15525 - DNA, 21 bp, Artificial Sequence
  Target HLA Sequence complement
ggactggcgcttcctccgcgg

SEQ ID NO: 15526 - DNA, 21 bp, Artificial Sequence
  Target HLA Sequence complement
gactggcgcttcctccgcggg

SEQ ID NO: 15527 - DNA, 21 bp, Artificial Sequence
  Target HLA Sequence complement
actggcgcttcctccgcgggt

SEQ ID NO: 15528 - DNA, 21 bp, Artificial Sequence
  Target HLA Sequence complement
ctggcgcttcctccgcgggta

SEQ ID NO: 15529 - DNA, 21 bp, Artificial Sequence
  Target HLA Sequence complement
tggcgcttcctccgcgggtac

SEQ ID NO: 15530 - DNA, 21 bp, Artificial Sequence
  Target HLA Sequence complement
ggcgcttcctccgcgggtacc

SEQ ID NO: 15531 - DNA, 21 bp, Artificial Sequence
  Target HLA Sequence complement
gcgcttcctccgcgggtacca

SEQ ID NO: 15532 - DNA, 21 bp, Artificial Sequence
  Target HLA Sequence complement
cgcttcctccgcgggtaccac

SEQ ID NO: 15533 - DNA, 21 bp, Artificial Sequence
  Target HLA Sequence complement
gcttcctccgcgggtaccacc

SEQ ID NO: 15534 - DNA, 21 bp, Artificial Sequence
  Target HLA Sequence complement
cttcctccgcgggtaccacca

SEQ ID NO: 15535 - DNA, 21 bp, Artificial Sequence
  Target HLA Sequence complement
ttcctccgcgggtaccaccag

SEQ ID NO: 15536 - DNA, 21 bp, Artificial Sequence
  Target HLA Sequence complement
tcctccgcgggtaccaccagt

SEQ ID NO: 15537 - DNA, 21 bp, Artificial Sequence
  Target HLA Sequence complement
cctccgcgggtaccaccagta

SEQ ID NO: 15538 - DNA, 21 bp, Artificial Sequence
  Target HLA Sequence complement
ctccgcgggtaccaccagtac

SEQ ID NO: 15539 - DNA, 21 bp, Artificial Sequence
  Target HLA Sequence complement
tccgcgggtaccaccagtacg

SEQ ID NO: 15540 - DNA, 21 bp, Artificial Sequence
  Target HLA Sequence complement
ccgcgggtaccaccagtacgc

SEQ ID NO: 15541 - DNA, 21 bp, Artificial Sequence
  Target HLA Sequence complement
cgcgggtaccaccagtacgcc

SEQ ID NO: 15542 - DNA, 21 bp, Artificial Sequence
  Target HLA Sequence complement
gcgggtaccaccagtacgcct

SEQ ID NO: 15543 - DNA, 21 bp, Artificial Sequence
  Target HLA Sequence complement
cgggtaccaccagtacgccta

SEQ ID NO: 15544 - DNA, 21 bp, Artificial Sequence
  Target HLA Sequence complement
gggtaccaccagtacgcctac

SEQ ID NO: 15545 - DNA, 21 bp, Artificial Sequence
  Target HLA Sequence complement
ggtaccaccagtacgcctacg

SEQ ID NO: 15546 - DNA, 21 bp, Artificial Sequence
  Target HLA Sequence complement
accaccagtacgcctacgacg

SEQ ID NO: 15547 - DNA, 21 bp, Artificial Sequence
  Target HLA Sequence complement
ccaccagtacgcctacgacgg

SEQ ID NO: 15548 - DNA, 21 bp, Artificial Sequence
  Target HLA Sequence complement
caccagtacgcctacgacggc

SEQ ID NO: 15549 - DNA, 21 bp, Artificial Sequence
  Target HLA Sequence complement
accagtacgcctacgacggca

SEQ ID NO: 15550 - DNA, 21 bp, Artificial Sequence
  Target HLA Sequence complement
ccagtacgcctacgacggcaa

SEQ ID NO: 15551 - DNA, 21 bp, Artificial Sequence
  Target HLA Sequence complement
cagtacgcctacgacggcaag

SEQ ID NO: 15552 - DNA, 21 bp, Artificial Sequence
  Target HLA Sequence complement
agtacgcctacgacggcaagg

SEQ ID NO: 15553 - DNA, 21 bp, Artificial Sequence
  Target HLA Sequence complement
gtacgcctacgacggcaagga

SEQ ID NO: 15554 - DNA, 21 bp, Artificial Sequence
  Target HLA Sequence complement
tcgccctgaaagaggacctgc

SEQ ID NO: 15555 - DNA, 21 bp, Artificial Sequence
  Target HLA Sequence complement
cgccctgaaagaggacctgcg

SEQ ID NO: 15556 - DNA, 21 bp, Artificial Sequence
  Target HLA Sequence complement
gccctgaaagaggacctgcgc

SEQ ID NO: 15557 - DNA, 21 bp, Artificial Sequence
  Target HLA Sequence complement
ccctgaaagaggacctgcgct

SEQ ID NO: 15558 - DNA, 21 bp, Artificial Sequence
  Target HLA Sequence complement
cctgaaagaggacctgcgctc

SEQ ID NO: 15559 - DNA, 21 bp, Artificial Sequence
  Target HLA Sequence complement
agaggacctgcgctcttggac

SEQ ID NO: 15560 - DNA, 21 bp, Artificial Sequence
  Target HLA Sequence complement
gaggacctgcgctcttggacc

SEQ ID NO: 15561 - DNA, 21 bp, Artificial Sequence
  Target HLA Sequence complement
aggacctgcgctcttggaccg

SEQ ID NO: 15562 - DNA, 21 bp, Artificial Sequence
  Target HLA Sequence complement
ggacctgcgctcttggaccgc

SEQ ID NO: 15563 - DNA, 21 bp, Artificial Sequence
  Target HLA Sequence complement
gacctgcgctcttggaccgcg

SEQ ID NO: 15564 - DNA, 21 bp, Artificial Sequence
  Target HLA Sequence complement
acctgcgctcttggaccgcgg

SEQ ID NO: 15565 - DNA, 21 bp, Artificial Sequence
  Target HLA Sequence complement
cctgcgctcttggaccgcggc

SEQ ID NO: 15566 - DNA, 21 bp, Artificial Sequence
  Target HLA Sequence complement
ctgcgctcttggaccgcggcg

SEQ ID NO: 15567 - DNA, 21 bp, Artificial Sequence
  Target HLA Sequence complement
tgcgctcttggaccgcggcgg

SEQ ID NO: 15568 - DNA, 21 bp, Artificial Sequence
  Target HLA Sequence complement
gcgctcttggaccgcggcgga

SEQ ID NO: 15569 - DNA, 21 bp, Artificial Sequence
  Target HLA Sequence complement
cgctcttggaccgcggcggac

SEQ ID NO: 15570 - DNA, 21 bp, Artificial Sequence
  Target HLA Sequence complement
gctcttggaccgcggcggaca

SEQ ID NO: 15571 - DNA, 21 bp, Artificial Sequence
  Target HLA Sequence complement
ctcttggaccgcggcggacat

SEQ ID NO: 15572 - DNA, 21 bp, Artificial Sequence
  Target HLA Sequence complement
tcttggaccgcggcggacatg

SEQ ID NO: 15573 - DNA, 21 bp, Artificial Sequence
  Target HLA Sequence complement
cttggaccgcggcggacatgg

SEQ ID NO: 15574 - DNA, 21 bp, Artificial Sequence
  Target HLA Sequence complement
ttggaccgcggcggacatggc

SEQ ID NO: 15575 - DNA, 21 bp, Artificial Sequence
  Target HLA Sequence complement
tggaccgcggcggacatggca

SEQ ID NO: 15576 - DNA, 21 bp, Artificial Sequence
  Target HLA Sequence complement
ggaccgcggcggacatggcag

SEQ ID NO: 15577 - DNA, 21 bp, Artificial Sequence
  Target HLA Sequence complement
gaccgcggcggacatggcagc

SEQ ID NO: 15578 - DNA, 21 bp, Artificial Sequence
  Target HLA Sequence complement
accgcggcggacatggcagct

SEQ ID NO: 15579 - DNA, 21 bp, Artificial Sequence
  Target HLA Sequence complement
ccgcggcggacatggcagctc

SEQ ID NO: 15580 - DNA, 21 bp, Artificial Sequence
  Target HLA Sequence complement
cgcggcggacatggcagctca

SEQ ID NO: 15581 - DNA, 21 bp, Artificial Sequence
  Target HLA Sequence complement
gcggcggacatggcagctcag

SEQ ID NO: 15582 - DNA, 21 bp, Artificial Sequence
  Target HLA Sequence complement
cggcggacatggcagctcaga

SEQ ID NO: 15583 - DNA, 21 bp, Artificial Sequence
  Target HLA Sequence complement
ggcggacatggcagctcagac

SEQ ID NO: 15584 - DNA, 21 bp, Artificial Sequence
  Target HLA Sequence complement
gcggacatggcagctcagacc

SEQ ID NO: 15585 - DNA, 21 bp, Artificial Sequence
  Target HLA Sequence complement
cggacatggcagctcagacca

SEQ ID NO: 15586 - DNA, 21 bp, Artificial Sequence
  Target HLA Sequence complement
ggacatggcagctcagaccac

SEQ ID NO: 15587 - DNA, 21 bp, Artificial Sequence
  Target HLA Sequence complement
gacatggcagctcagaccacc

SEQ ID NO: 15588 - DNA, 21 bp, Artificial Sequence
  Target HLA Sequence complement
tggcagctcagaccaccaagc

SEQ ID NO: 15589 - DNA, 21 bp, Artificial Sequence
  Target HLA Sequence complement
ggcagctcagaccaccaagca

SEQ ID NO: 15590 - DNA, 21 bp, Artificial Sequence
  Target HLA Sequence complement
gcagctcagaccaccaagcac

SEQ ID NO: 15591 - DNA, 21 bp, Artificial Sequence
  Target HLA Sequence complement
ccaccaagcacaagtgggagg

SEQ ID NO: 15592 - DNA, 21 bp, Artificial Sequence
  Target HLA Sequence complement
caccaagcacaagtgggaggc

SEQ ID NO: 15593 - DNA, 21 bp, Artificial Sequence
  Target HLA Sequence complement
accaagcacaagtgggaggcg

SEQ ID NO: 15594 - DNA, 21 bp, Artificial Sequence
  Target HLA Sequence complement
ccaagcacaagtgggaggcgg

SEQ ID NO: 15595 - DNA, 21 bp, Artificial Sequence
  Target HLA Sequence complement
caagcacaagtgggaggcggc

SEQ ID NO: 15596 - DNA, 21 bp, Artificial Sequence
  Target HLA Sequence complement
aagcacaagtgggaggcggcc

SEQ ID NO: 15597 - DNA, 21 bp, Artificial Sequence
  Target HLA Sequence complement
agcacaagtgggaggcggccc

SEQ ID NO: 15598 - DNA, 21 bp, Artificial Sequence
  Target HLA Sequence complement
gcacaagtgggaggcggccca

SEQ ID NO: 15599 - DNA, 21 bp, Artificial Sequence
  Target HLA Sequence complement
cacaagtgggaggcggcccat

SEQ ID NO: 15600 - DNA, 21 bp, Artificial Sequence
  Target HLA Sequence complement
acaagtgggaggcggcccatg

SEQ ID NO: 15601 - DNA, 21 bp, Artificial Sequence
  Target HLA Sequence complement
caagtgggaggcggcccatgt

SEQ ID NO: 15602 - DNA, 21 bp, Artificial Sequence
  Target HLA Sequence complement
aagtgggaggcggcccatgtg

SEQ ID NO: 15603 - DNA, 21 bp, Artificial Sequence
  Target HLA Sequence complement
agtgggaggcggcccatgtgg

SEQ ID NO: 15604 - DNA, 21 bp, Artificial Sequence
  Target HLA Sequence complement
gtgggaggcggcccatgtggc

SEQ ID NO: 15605 - DNA, 21 bp, Artificial Sequence
  Target HLA Sequence complement
tgggaggcggcccatgtggcg

SEQ ID NO: 15606 - DNA, 21 bp, Artificial Sequence
  Target HLA Sequence complement
gggaggcggcccatgtggcgg

SEQ ID NO: 15607 - DNA, 21 bp, Artificial Sequence
  Target HLA Sequence complement
ggaggcggcccatgtggcgga

SEQ ID NO: 15608 - DNA, 21 bp, Artificial Sequence
  Target HLA Sequence complement
gaggcggcccatgtggcggag

SEQ ID NO: 15609 - DNA, 21 bp, Artificial Sequence
  Target HLA Sequence complement
aggcggcccatgtggcggagc

SEQ ID NO: 15610 - DNA, 21 bp, Artificial Sequence
  Target HLA Sequence complement
ggcggcccatgtggcggagca

SEQ ID NO: 15611 - DNA, 21 bp, Artificial Sequence
  Target HLA Sequence complement
gcggcccatgtggcggagcag

SEQ ID NO: 15612 - DNA, 21 bp, Artificial Sequence
  Target HLA Sequence complement
cggcccatgtggcggagcagt

SEQ ID NO: 15613 - DNA, 21 bp, Artificial Sequence
  Target HLA Sequence complement
ggcccatgtggcggagcagtt

SEQ ID NO: 15614 - DNA, 21 bp, Artificial Sequence
  Target HLA Sequence complement
gcccatgtggcggagcagttg

SEQ ID NO: 15615 - DNA, 21 bp, Artificial Sequence
  Target HLA Sequence complement
cccatgtggcggagcagttga

SEQ ID NO: 15616 - DNA, 21 bp, Artificial Sequence
  Target HLA Sequence complement
ccatgtggcggagcagttgag

SEQ ID NO: 15617 - DNA, 21 bp, Artificial Sequence
  Target HLA Sequence complement
tgtggcggagcagttgagagc

SEQ ID NO: 15618 - DNA, 21 bp, Artificial Sequence
  Target HLA Sequence complement
gtggcggagcagttgagagcc

SEQ ID NO: 15619 - DNA, 21 bp, Artificial Sequence
  Target HLA Sequence complement
tggcggagcagttgagagcct

SEQ ID NO: 15620 - DNA, 21 bp, Artificial Sequence
  Target HLA Sequence complement
ggcggagcagttgagagccta

SEQ ID NO: 15621 - DNA, 21 bp, Artificial Sequence
  Target HLA Sequence complement
gcggagcagttgagagcctac

SEQ ID NO: 15622 - DNA, 21 bp, Artificial Sequence
  Target HLA Sequence complement
cggagcagttgagagcctacc

SEQ ID NO: 15623 - DNA, 21 bp, Artificial Sequence
  Target HLA Sequence complement
gttgagagcctacctggaggg

SEQ ID NO: 15624 - DNA, 21 bp, Artificial Sequence
  Target HLA Sequence complement
ttgagagcctacctggagggc

SEQ ID NO: 15625 - DNA, 21 bp, Artificial Sequence
  Target HLA Sequence complement
tgagagcctacctggagggca

SEQ ID NO: 15626 - DNA, 21 bp, Artificial Sequence
  Target HLA Sequence complement
gagagcctacctggagggcac

SEQ ID NO: 15627 - DNA, 21 bp, Artificial Sequence
  Target HLA Sequence complement
agagcctacctggagggcacg

SEQ ID NO: 15628 - DNA, 21 bp, Artificial Sequence
  Target HLA Sequence complement
gagcctacctggagggcacgt

SEQ ID NO: 15629 - DNA, 21 bp, Artificial Sequence
  Target HLA Sequence complement
agcctacctggagggcacgtg

SEQ ID NO: 15630 - DNA, 21 bp, Artificial Sequence
  Target HLA Sequence complement
gcctacctggagggcacgtgc

SEQ ID NO: 15631 - DNA, 21 bp, Artificial Sequence
  Target HLA Sequence complement
cctacctggagggcacgtgcg

SEQ ID NO: 15632 - DNA, 21 bp, Artificial Sequence
  Target HLA Sequence complement
ctacctggagggcacgtgcgt

SEQ ID NO: 15633 - DNA, 21 bp, Artificial Sequence
  Target HLA Sequence complement
tacctggagggcacgtgcgtg

SEQ ID NO: 15634 - DNA, 21 bp, Artificial Sequence
  Target HLA Sequence complement
acctggagggcacgtgcgtgg

SEQ ID NO: 15635 - DNA, 21 bp, Artificial Sequence
  Target HLA Sequence complement
cctggagggcacgtgcgtgga

SEQ ID NO: 15636 - DNA, 21 bp, Artificial Sequence
  Target HLA Sequence complement
ctggagggcacgtgcgtggag

SEQ ID NO: 15637 - DNA, 21 bp, Artificial Sequence
  Target HLA Sequence complement
tggagggcacgtgcgtggagt

SEQ ID NO: 15638 - DNA, 21 bp, Artificial Sequence
  Target HLA Sequence complement
ggagggcacgtgcgtggagtg

SEQ ID NO: 15639 - DNA, 21 bp, Artificial Sequence
  Target HLA Sequence complement
gagggcacgtgcgtggagtgg

SEQ ID NO: 15640 - DNA, 21 bp, Artificial Sequence
  Target HLA Sequence complement
agggcacgtgcgtggagtggc

SEQ ID NO: 15641 - DNA, 21 bp, Artificial Sequence
  Target HLA Sequence complement
gggcacgtgcgtggagtggct

SEQ ID NO: 15642 - DNA, 21 bp, Artificial Sequence
  Target HLA Sequence complement
ggcacgtgcgtggagtggctc

SEQ ID NO: 15643 - DNA, 21 bp, Artificial Sequence
  Target HLA Sequence complement
gcacgtgcgtggagtggctcc

SEQ ID NO: 15644 - DNA, 21 bp, Artificial Sequence
  Target HLA Sequence complement
cacgtgcgtggagtggctccg

SEQ ID NO: 15645 - DNA, 21 bp, Artificial Sequence
  Target HLA Sequence complement
acgtgcgtggagtggctccgc

SEQ ID NO: 15646 - DNA, 21 bp, Artificial Sequence
  Target HLA Sequence complement
cgtgcgtggagtggctccgca

SEQ ID NO: 15647 - DNA, 21 bp, Artificial Sequence
  Target HLA Sequence complement
gtgcgtggagtggctccgcag

SEQ ID NO: 15648 - DNA, 21 bp, Artificial Sequence
  Target HLA Sequence complement
tgcgtggagtggctccgcaga

SEQ ID NO: 15649 - DNA, 21 bp, Artificial Sequence
  Target HLA Sequence complement
gcgtggagtggctccgcagat

SEQ ID NO: 15650 - DNA, 21 bp, Artificial Sequence
  Target HLA Sequence complement
cgtggagtggctccgcagata

SEQ ID NO: 15651 - DNA, 21 bp, Artificial Sequence
  Target HLA Sequence complement
gtggagtggctccgcagatac

SEQ ID NO: 15652 - DNA, 21 bp, Artificial Sequence
  Target HLA Sequence complement
tggagtggctccgcagatacc

SEQ ID NO: 15653 - DNA, 21 bp, Artificial Sequence
  Target HLA Sequence complement
ggagtggctccgcagatacct

SEQ ID NO: 15654 - DNA, 21 bp, Artificial Sequence
  Target HLA Sequence complement
gagtggctccgcagatacctg

SEQ ID NO: 15655 - DNA, 21 bp, Artificial Sequence
  Target HLA Sequence complement
agtggctccgcagatacctgg

SEQ ID NO: 15656 - DNA, 21 bp, Artificial Sequence
  Target HLA Sequence complement
gtggctccgcagatacctgga

SEQ ID NO: 15657 - DNA, 21 bp, Artificial Sequence
  Target HLA Sequence complement
tggctccgcagatacctggag

SEQ ID NO: 15658 - DNA, 21 bp, Artificial Sequence
  Target HLA Sequence complement
ggctccgcagatacctggaga

SEQ ID NO: 15659 - DNA, 21 bp, Artificial Sequence
  Target HLA Sequence complement
ccgcagatacctggagaacgg

SEQ ID NO: 15660 - DNA, 21 bp, Artificial Sequence
  Target HLA Sequence complement
cgcagatacctggagaacggg

SEQ ID NO: 15661 - DNA, 21 bp, Artificial Sequence
  Target HLA Sequence complement
cctggagaacgggaaggagac

SEQ ID NO: 15662 - DNA, 21 bp, Artificial Sequence
  Target HLA Sequence complement
ctggagaacgggaaggagacg

SEQ ID NO: 15663 - DNA, 21 bp, Artificial Sequence
  Target HLA Sequence complement
tggagaacgggaaggagacgc

SEQ ID NO: 15664 - DNA, 21 bp, Artificial Sequence
  Target HLA Sequence complement
ggagaacgggaaggagacgct

SEQ ID NO: 15665 - DNA, 21 bp, Artificial Sequence
  Target HLA Sequence complement
gagaacgggaaggagacgctg

SEQ ID NO: 15666 - DNA, 21 bp, Artificial Sequence
  Target HLA Sequence complement
agaacgggaaggagacgctgc

SEQ ID NO: 15667 - DNA, 21 bp, Artificial Sequence
  Target HLA Sequence complement
gaacgggaaggagacgctgca

SEQ ID NO: 15668 - DNA, 21 bp, Artificial Sequence
  Target HLA Sequence complement
aacgggaaggagacgctgcag

SEQ ID NO: 15669 - DNA, 21 bp, Artificial Sequence
  Target HLA Sequence complement
acgggaaggagacgctgcagc

SEQ ID NO: 15670 - DNA, 21 bp, Artificial Sequence
  Target HLA Sequence complement
cgggaaggagacgctgcagcg

SEQ ID NO: 15671 - DNA, 21 bp, Artificial Sequence
  Target HLA Sequence complement
gggaaggagacgctgcagcgc

SEQ ID NO: 15672 - DNA, 21 bp, Artificial Sequence
  Target HLA Sequence complement
ggaaggagacgctgcagcgca

SEQ ID NO: 15673 - DNA, 21 bp, Artificial Sequence
  Target HLA Sequence complement
gaaggagacgctgcagcgcac

SEQ ID NO: 15674 - DNA, 21 bp, Artificial Sequence
  Target HLA Sequence complement
aaggagacgctgcagcgcacg

SEQ ID NO: 15675 - DNA, 21 bp, Artificial Sequence
  Target HLA Sequence complement
aggagacgctgcagcgcacgg

SEQ ID NO: 15676 - DNA, 21 bp, Artificial Sequence
  Target HLA Sequence complement
ggagacgctgcagcgcacgga

SEQ ID NO: 15677 - DNA, 21 bp, Artificial Sequence
  Target HLA Sequence complement
gagacgctgcagcgcacggac

SEQ ID NO: 15678 - DNA, 21 bp, Artificial Sequence
  Target HLA Sequence complement
agacgctgcagcgcacggacg

SEQ ID NO: 15679 - DNA, 21 bp, Artificial Sequence
  Target HLA Sequence complement
gacgctgcagcgcacggacgc

SEQ ID NO: 15680 - DNA, 21 bp, Artificial Sequence
  Target HLA Sequence complement
acgctgcagcgcacggacgcc

SEQ ID NO: 15681 - DNA, 21 bp, Artificial Sequence
  Target HLA Sequence complement
cgctgcagcgcacggacgccc

SEQ ID NO: 15682 - DNA, 21 bp, Artificial Sequence
  Target HLA Sequence complement
gctgcagcgcacggacgcccc

SEQ ID NO: 15683 - DNA, 21 bp, Artificial Sequence
  Target HLA Sequence complement
ctgcagcgcacggacgccccc

SEQ ID NO: 15684 - DNA, 21 bp, Artificial Sequence
  Target HLA Sequence complement
tgcagcgcacggacgccccca

SEQ ID NO: 15685 - DNA, 21 bp, Artificial Sequence
  Target HLA Sequence complement
gcagcgcacggacgcccccaa

SEQ ID NO: 15686 - DNA, 21 bp, Artificial Sequence
  Target HLA Sequence complement
cagcgcacggacgcccccaaa

SEQ ID NO: 15687 - DNA, 21 bp, Artificial Sequence
  Target HLA Sequence complement
agcgcacggacgcccccaaaa

SEQ ID NO: 15688 - DNA, 21 bp, Artificial Sequence
  Target HLA Sequence complement
gcgcacggacgcccccaaaac

SEQ ID NO: 15689 - DNA, 21 bp, Artificial Sequence
  Target HLA Sequence complement
cgcacggacgcccccaaaacg

SEQ ID NO: 15690 - DNA, 21 bp, Artificial Sequence
  Target HLA Sequence complement
gcacggacgcccccaaaacgc

SEQ ID NO: 15691 - DNA, 21 bp, Artificial Sequence
  Target HLA Sequence complement
cacggacgcccccaaaacgca

SEQ ID NO: 15692 - DNA, 21 bp, Artificial Sequence
  Target HLA Sequence complement
acggacgcccccaaaacgcat

SEQ ID NO: 15693 - DNA, 21 bp, Artificial Sequence
  Target HLA Sequence complement
cggacgcccccaaaacgcata

SEQ ID NO: 15694 - DNA, 21 bp, Artificial Sequence
  Target HLA Sequence complement
ctcaccacgctgtctctgacc

SEQ ID NO: 15695 - DNA, 21 bp, Artificial Sequence
  Target HLA Sequence complement
gaccatgaagccaccctgagg

SEQ ID NO: 15696 - DNA, 21 bp, Artificial Sequence
  Target HLA Sequence complement
ccatgaagccaccctgaggtg

SEQ ID NO: 15697 - DNA, 21 bp, Artificial Sequence
  Target HLA Sequence complement
catgaagccaccctgaggtgc

SEQ ID NO: 15698 - DNA, 21 bp, Artificial Sequence
  Target HLA Sequence complement
tgaagccaccctgaggtgctg

SEQ ID NO: 15699 - DNA, 21 bp, Artificial Sequence
  Target HLA Sequence complement
gaagccaccctgaggtgctgg

SEQ ID NO: 15700 - DNA, 21 bp, Artificial Sequence
  Target HLA Sequence complement
aagccaccctgaggtgctggg

SEQ ID NO: 15701 - DNA, 21 bp, Artificial Sequence
  Target HLA Sequence complement
agccaccctgaggtgctgggc

SEQ ID NO: 15702 - DNA, 21 bp, Artificial Sequence
  Target HLA Sequence complement
gccaccctgaggtgctgggcc

SEQ ID NO: 15703 - DNA, 21 bp, Artificial Sequence
  Target HLA Sequence complement
ccaccctgaggtgctgggccc

SEQ ID NO: 15704 - DNA, 21 bp, Artificial Sequence
  Target HLA Sequence complement
caccctgaggtgctgggccct

SEQ ID NO: 15705 - DNA, 21 bp, Artificial Sequence
  Target HLA Sequence complement
accctgaggtgctgggccctg

SEQ ID NO: 15706 - DNA, 21 bp, Artificial Sequence
  Target HLA Sequence complement
ccctgaggtgctgggccctga

SEQ ID NO: 15707 - DNA, 21 bp, Artificial Sequence
  Target HLA Sequence complement
cctgaggtgctgggccctgag

SEQ ID NO: 15708 - DNA, 21 bp, Artificial Sequence
  Target HLA Sequence complement
ctgaggtgctgggccctgagc

SEQ ID NO: 15709 - DNA, 21 bp, Artificial Sequence
  Target HLA Sequence complement
tgaggtgctgggccctgagct

SEQ ID NO: 15710 - DNA, 21 bp, Artificial Sequence
  Target HLA Sequence complement
gaggtgctgggccctgagctt

SEQ ID NO: 15711 - DNA, 21 bp, Artificial Sequence
  Target HLA Sequence complement
aggtgctgggccctgagcttc

SEQ ID NO: 15712 - DNA, 21 bp, Artificial Sequence
  Target HLA Sequence complement
ggtgctgggccctgagcttct

SEQ ID NO: 15713 - DNA, 21 bp, Artificial Sequence
  Target HLA Sequence complement
gtgctgggccctgagcttcta

SEQ ID NO: 15714 - DNA, 21 bp, Artificial Sequence
  Target HLA Sequence complement
tgctgggccctgagcttctac

SEQ ID NO: 15715 - DNA, 21 bp, Artificial Sequence
  Target HLA Sequence complement
gctgggccctgagcttctacc

SEQ ID NO: 15716 - DNA, 21 bp, Artificial Sequence
  Target HLA Sequence complement
ctgggccctgagcttctaccc

SEQ ID NO: 15717 - DNA, 21 bp, Artificial Sequence
  Target HLA Sequence complement
tgggccctgagcttctaccct

SEQ ID NO: 15718 - DNA, 21 bp, Artificial Sequence
  Target HLA Sequence complement
gggccctgagcttctaccctg

SEQ ID NO: 15719 - DNA, 21 bp, Artificial Sequence
  Target HLA Sequence complement
ggccctgagcttctaccctgc

SEQ ID NO: 15720 - DNA, 21 bp, Artificial Sequence
  Target HLA Sequence complement
gccctgagcttctaccctgcg

SEQ ID NO: 15721 - DNA, 21 bp, Artificial Sequence
  Target HLA Sequence complement
ccctgagcttctaccctgcgg

SEQ ID NO: 15722 - DNA, 21 bp, Artificial Sequence
  Target HLA Sequence complement
cctgagcttctaccctgcgga

SEQ ID NO: 15723 - DNA, 21 bp, Artificial Sequence
  Target HLA Sequence complement
ctgagcttctaccctgcggag

SEQ ID NO: 15724 - DNA, 21 bp, Artificial Sequence
  Target HLA Sequence complement
ccctgcggagatcacactgac

SEQ ID NO: 15725 - DNA, 21 bp, Artificial Sequence
  Target HLA Sequence complement
cctgcggagatcacactgacc

SEQ ID NO: 15726 - DNA, 21 bp, Artificial Sequence
  Target HLA Sequence complement
gcggagatcacactgacctgg

SEQ ID NO: 15727 - DNA, 21 bp, Artificial Sequence
  Target HLA Sequence complement
cggagatcacactgacctggc

SEQ ID NO: 15728 - DNA, 21 bp, Artificial Sequence
  Target HLA Sequence complement
gatcacactgacctggcagcg

SEQ ID NO: 15729 - DNA, 21 bp, Artificial Sequence
  Target HLA Sequence complement
atcacactgacctggcagcgg

SEQ ID NO: 15730 - DNA, 21 bp, Artificial Sequence
  Target HLA Sequence complement
tcacactgacctggcagcggg

SEQ ID NO: 15731 - DNA, 21 bp, Artificial Sequence
  Target HLA Sequence complement
cacactgacctggcagcggga

SEQ ID NO: 15732 - DNA, 21 bp, Artificial Sequence
  Target HLA Sequence complement
acactgacctggcagcgggat

SEQ ID NO: 15733 - DNA, 21 bp, Artificial Sequence
  Target HLA Sequence complement
cactgacctggcagcgggatg

SEQ ID NO: 15734 - DNA, 21 bp, Artificial Sequence
  Target HLA Sequence complement
actgacctggcagcgggatgg

SEQ ID NO: 15735 - DNA, 21 bp, Artificial Sequence
  Target HLA Sequence complement
ctgacctggcagcgggatggg

SEQ ID NO: 15736 - DNA, 21 bp, Artificial Sequence
  Target HLA Sequence complement
tgacctggcagcgggatgggg

SEQ ID NO: 15737 - DNA, 21 bp, Artificial Sequence
  Target HLA Sequence complement
gacctggcagcgggatgggga

SEQ ID NO: 15738 - DNA, 21 bp, Artificial Sequence
  Target HLA Sequence complement
acctggcagcgggatggggag

SEQ ID NO: 15739 - DNA, 21 bp, Artificial Sequence
  Target HLA Sequence complement
cctggcagcgggatggggagg

SEQ ID NO: 15740 - DNA, 21 bp, Artificial Sequence
  Target HLA Sequence complement
ctggcagcgggatggggagga

SEQ ID NO: 15741 - DNA, 21 bp, Artificial Sequence
  Target HLA Sequence complement
tggcagcgggatggggaggac

SEQ ID NO: 15742 - DNA, 21 bp, Artificial Sequence
  Target HLA Sequence complement
ggcagcgggatggggaggacc

SEQ ID NO: 15743 - DNA, 21 bp, Artificial Sequence
  Target HLA Sequence complement
gcagcgggatggggaggacca

SEQ ID NO: 15744 - DNA, 21 bp, Artificial Sequence
  Target HLA Sequence complement
cagcgggatggggaggaccag

SEQ ID NO: 15745 - DNA, 21 bp, Artificial Sequence
  Target HLA Sequence complement
agcgggatggggaggaccaga

SEQ ID NO: 15746 - DNA, 21 bp, Artificial Sequence
  Target HLA Sequence complement
gcgggatggggaggaccagac

SEQ ID NO: 15747 - DNA, 21 bp, Artificial Sequence
  Target HLA Sequence complement
cgggatggggaggaccagacc

SEQ ID NO: 15748 - DNA, 21 bp, Artificial Sequence
  Target HLA Sequence complement
gggatggggaggaccagaccc

SEQ ID NO: 15749 - DNA, 21 bp, Artificial Sequence
  Target HLA Sequence complement
ggatggggaggaccagaccca

SEQ ID NO: 15750 - DNA, 21 bp, Artificial Sequence
  Target HLA Sequence complement
gatggggaggaccagacccag

SEQ ID NO: 15751 - DNA, 21 bp, Artificial Sequence
  Target HLA Sequence complement
atggggaggaccagacccagg

SEQ ID NO: 15752 - DNA, 21 bp, Artificial Sequence
  Target HLA Sequence complement
tggggaggaccagacccagga

SEQ ID NO: 15753 - DNA, 21 bp, Artificial Sequence
  Target HLA Sequence complement
ggggaggaccagacccaggac

SEQ ID NO: 15754 - DNA, 21 bp, Artificial Sequence
  Target HLA Sequence complement
gggaggaccagacccaggaca

SEQ ID NO: 15755 - DNA, 21 bp, Artificial Sequence
  Target HLA Sequence complement
ggaggaccagacccaggacac

SEQ ID NO: 15756 - DNA, 21 bp, Artificial Sequence
  Target HLA Sequence complement
gaggaccagacccaggacacg

SEQ ID NO: 15757 - DNA, 21 bp, Artificial Sequence
  Target HLA Sequence complement
aggaccagacccaggacacgg

SEQ ID NO: 15758 - DNA, 21 bp, Artificial Sequence
  Target HLA Sequence complement
ggaccagacccaggacacgga

SEQ ID NO: 15759 - DNA, 21 bp, Artificial Sequence
  Target HLA Sequence complement
gaccagacccaggacacggag

SEQ ID NO: 15760 - DNA, 21 bp, Artificial Sequence
  Target HLA Sequence complement
accagacccaggacacggagc

SEQ ID NO: 15761 - DNA, 21 bp, Artificial Sequence
  Target HLA Sequence complement
ccagacccaggacacggagct

SEQ ID NO: 15762 - DNA, 21 bp, Artificial Sequence
  Target HLA Sequence complement
cagacccaggacacggagctc

SEQ ID NO: 15763 - DNA, 21 bp, Artificial Sequence
  Target HLA Sequence complement
agacccaggacacggagctcg

SEQ ID NO: 15764 - DNA, 21 bp, Artificial Sequence
  Target HLA Sequence complement
gacccaggacacggagctcgt

SEQ ID NO: 15765 - DNA, 21 bp, Artificial Sequence
  Target HLA Sequence complement
acccaggacacggagctcgtg

SEQ ID NO: 15766 - DNA, 21 bp, Artificial Sequence
  Target HLA Sequence complement
cccaggacacggagctcgtgg

SEQ ID NO: 15767 - DNA, 21 bp, Artificial Sequence
  Target HLA Sequence complement
ccaggacacggagctcgtgga

SEQ ID NO: 15768 - DNA, 21 bp, Artificial Sequence
  Target HLA Sequence complement
caggacacggagctcgtggag

SEQ ID NO: 15769 - DNA, 21 bp, Artificial Sequence
  Target HLA Sequence complement
aggacacggagctcgtggaga

SEQ ID NO: 15770 - DNA, 21 bp, Artificial Sequence
  Target HLA Sequence complement
ggacacggagctcgtggagac

SEQ ID NO: 15771 - DNA, 21 bp, Artificial Sequence
  Target HLA Sequence complement
gacacggagctcgtggagacc

SEQ ID NO: 15772 - DNA, 21 bp, Artificial Sequence
  Target HLA Sequence complement
acacggagctcgtggagacca

SEQ ID NO: 15773 - DNA, 21 bp, Artificial Sequence
  Target HLA Sequence complement
cacggagctcgtggagaccag

SEQ ID NO: 15774 - DNA, 21 bp, Artificial Sequence
  Target HLA Sequence complement
acggagctcgtggagaccagg

SEQ ID NO: 15775 - DNA, 21 bp, Artificial Sequence
  Target HLA Sequence complement
cggagctcgtggagaccaggc

SEQ ID NO: 15776 - DNA, 21 bp, Artificial Sequence
  Target HLA Sequence complement
ggagctcgtggagaccaggcc

SEQ ID NO: 15777 - DNA, 21 bp, Artificial Sequence
  Target HLA Sequence complement
gagctcgtggagaccaggcct

SEQ ID NO: 15778 - DNA, 21 bp, Artificial Sequence
  Target HLA Sequence complement
agctcgtggagaccaggcctg

SEQ ID NO: 15779 - DNA, 21 bp, Artificial Sequence
  Target HLA Sequence complement
gctcgtggagaccaggcctgc

SEQ ID NO: 15780 - DNA, 21 bp, Artificial Sequence
  Target HLA Sequence complement
ctcgtggagaccaggcctgca

SEQ ID NO: 15781 - DNA, 21 bp, Artificial Sequence
  Target HLA Sequence complement
tcgtggagaccaggcctgcag

SEQ ID NO: 15782 - DNA, 21 bp, Artificial Sequence
  Target HLA Sequence complement
cgtggagaccaggcctgcagg

SEQ ID NO: 15783 - DNA, 21 bp, Artificial Sequence
  Target HLA Sequence complement
gtggagaccaggcctgcaggg

SEQ ID NO: 15784 - DNA, 21 bp, Artificial Sequence
  Target HLA Sequence complement
tggagaccaggcctgcagggg

SEQ ID NO: 15785 - DNA, 21 bp, Artificial Sequence
  Target HLA Sequence complement
ggagaccaggcctgcagggga

SEQ ID NO: 15786 - DNA, 21 bp, Artificial Sequence
  Target HLA Sequence complement
gagaccaggcctgcaggggat

SEQ ID NO: 15787 - DNA, 21 bp, Artificial Sequence
  Target HLA Sequence complement
agaccaggcctgcaggggatg

SEQ ID NO: 15788 - DNA, 21 bp, Artificial Sequence
  Target HLA Sequence complement
gaccaggcctgcaggggatgg

SEQ ID NO: 15789 - DNA, 21 bp, Artificial Sequence
  Target HLA Sequence complement
accaggcctgcaggggatgga

SEQ ID NO: 15790 - DNA, 21 bp, Artificial Sequence
  Target HLA Sequence complement
ccaggcctgcaggggatggaa

SEQ ID NO: 15791 - DNA, 21 bp, Artificial Sequence
  Target HLA Sequence complement
caggcctgcaggggatggaac

SEQ ID NO: 15792 - DNA, 21 bp, Artificial Sequence
  Target HLA Sequence complement
aggcctgcaggggatggaacc

SEQ ID NO: 15793 - DNA, 21 bp, Artificial Sequence
  Target HLA Sequence complement
ggcctgcaggggatggaacct

SEQ ID NO: 15794 - DNA, 21 bp, Artificial Sequence
  Target HLA Sequence complement
gcctgcaggggatggaacctt

SEQ ID NO: 15795 - DNA, 21 bp, Artificial Sequence
  Target HLA Sequence complement
cctgcaggggatggaaccttc

SEQ ID NO: 15796 - DNA, 21 bp, Artificial Sequence
  Target HLA Sequence complement
ctgcaggggatggaaccttcc

SEQ ID NO: 15797 - DNA, 21 bp, Artificial Sequence
  Target HLA Sequence complement
gcaggggatggaaccttccag

SEQ ID NO: 15798 - DNA, 21 bp, Artificial Sequence
  Target HLA Sequence complement
ggaaccttccagaagtgggcg

SEQ ID NO: 15799 - DNA, 21 bp, Artificial Sequence
  Target HLA Sequence complement
gaaccttccagaagtgggcgg

SEQ ID NO: 15800 - DNA, 21 bp, Artificial Sequence
  Target HLA Sequence complement
aaccttccagaagtgggcggc

SEQ ID NO: 15801 - DNA, 21 bp, Artificial Sequence
  Target HLA Sequence complement
accttccagaagtgggcggct

SEQ ID NO: 15802 - DNA, 21 bp, Artificial Sequence
  Target HLA Sequence complement
ccttccagaagtgggcggctg

SEQ ID NO: 15803 - DNA, 21 bp, Artificial Sequence
  Target HLA Sequence complement
cttccagaagtgggcggctgt

SEQ ID NO: 15804 - DNA, 21 bp, Artificial Sequence
  Target HLA Sequence complement
ttccagaagtgggcggctgtg

SEQ ID NO: 15805 - DNA, 21 bp, Artificial Sequence
  Target HLA Sequence complement
tccagaagtgggcggctgtgg

SEQ ID NO: 15806 - DNA, 21 bp, Artificial Sequence
  Target HLA Sequence complement
ccagaagtgggcggctgtggt

SEQ ID NO: 15807 - DNA, 21 bp, Artificial Sequence
  Target HLA Sequence complement
cagaagtgggcggctgtggtg

SEQ ID NO: 15808 - DNA, 21 bp, Artificial Sequence
  Target HLA Sequence complement
agaagtgggcggctgtggtgg

SEQ ID NO: 15809 - DNA, 21 bp, Artificial Sequence
  Target HLA Sequence complement
gaagtgggcggctgtggtggt

SEQ ID NO: 15810 - DNA, 21 bp, Artificial Sequence
  Target HLA Sequence complement
aagtgggcggctgtggtggtg

SEQ ID NO: 15811 - DNA, 21 bp, Artificial Sequence
  Target HLA Sequence complement
agtgggcggctgtggtggtgc

SEQ ID NO: 15812 - DNA, 21 bp, Artificial Sequence
  Target HLA Sequence complement
gtgggcggctgtggtggtgcc

SEQ ID NO: 15813 - DNA, 21 bp, Artificial Sequence
  Target HLA Sequence complement
tgggcggctgtggtggtgcct

SEQ ID NO: 15814 - DNA, 21 bp, Artificial Sequence
  Target HLA Sequence complement
gggcggctgtggtggtgcctt

SEQ ID NO: 15815 - DNA, 21 bp, Artificial Sequence
  Target HLA Sequence complement
ggcggctgtggtggtgccttc

SEQ ID NO: 15816 - DNA, 21 bp, Artificial Sequence
  Target HLA Sequence complement
gcggctgtggtggtgccttct

SEQ ID NO: 15817 - DNA, 21 bp, Artificial Sequence
  Target HLA Sequence complement
cggctgtggtggtgccttctg

SEQ ID NO: 15818 - DNA, 21 bp, Artificial Sequence
  Target HLA Sequence complement
ggctgtggtggtgccttctgg

SEQ ID NO: 15819 - DNA, 21 bp, Artificial Sequence
  Target HLA Sequence complement
gctgtggtggtgccttctgga

SEQ ID NO: 15820 - DNA, 21 bp, Artificial Sequence
  Target HLA Sequence complement
ctgtggtggtgccttctggac

SEQ ID NO: 15821 - DNA, 21 bp, Artificial Sequence
  Target HLA Sequence complement
gtggtggtgccttctggacag

SEQ ID NO: 15822 - DNA, 21 bp, Artificial Sequence
  Target HLA Sequence complement
tggtggtgccttctggacagg

SEQ ID NO: 15823 - DNA, 21 bp, Artificial Sequence
  Target HLA Sequence complement
ggtggtgccttctggacagga

SEQ ID NO: 15824 - DNA, 21 bp, Artificial Sequence
  Target HLA Sequence complement
gtggtgccttctggacaggag

SEQ ID NO: 15825 - DNA, 21 bp, Artificial Sequence
  Target HLA Sequence complement
tggtgccttctggacaggagc

SEQ ID NO: 15826 - DNA, 21 bp, Artificial Sequence
  Target HLA Sequence complement
ggtgccttctggacaggagca

SEQ ID NO: 15827 - DNA, 21 bp, Artificial Sequence
  Target HLA Sequence complement
gtgccttctggacaggagcag

SEQ ID NO: 15828 - DNA, 21 bp, Artificial Sequence
  Target HLA Sequence complement
gccttctggacaggagcagag

SEQ ID NO: 15829 - DNA, 21 bp, Artificial Sequence
  Target HLA Sequence complement
cctgccatgtgcagcatgagg

SEQ ID NO: 15830 - DNA, 21 bp, Artificial Sequence
  Target HLA Sequence complement
ctgccatgtgcagcatgaggg

SEQ ID NO: 15831 - DNA, 21 bp, Artificial Sequence
  Target HLA Sequence complement
gtgcagcatgagggtttgccc

SEQ ID NO: 15832 - DNA, 21 bp, Artificial Sequence
  Target HLA Sequence complement
gcatgagggtttgcccaagcc

SEQ ID NO: 15833 - DNA, 21 bp, Artificial Sequence
  Target HLA Sequence complement
catgagggtttgcccaagccc

SEQ ID NO: 15834 - DNA, 21 bp, Artificial Sequence
  Target HLA Sequence complement
atgagggtttgcccaagcccc

SEQ ID NO: 15835 - DNA, 21 bp, Artificial Sequence
  Target HLA Sequence complement
tgagggtttgcccaagcccct

SEQ ID NO: 15836 - DNA, 21 bp, Artificial Sequence
  Target HLA Sequence complement
gagggtttgcccaagcccctc

SEQ ID NO: 15837 - DNA, 21 bp, Artificial Sequence
  Target HLA Sequence complement
agggtttgcccaagcccctca

SEQ ID NO: 15838 - DNA, 21 bp, Artificial Sequence
  Target HLA Sequence complement
gggtttgcccaagcccctcac

SEQ ID NO: 15839 - DNA, 21 bp, Artificial Sequence
  Target HLA Sequence complement
ggtttgcccaagcccctcacc

SEQ ID NO: 15840 - DNA, 21 bp, Artificial Sequence
  Target HLA Sequence complement
gtttgcccaagcccctcaccc

SEQ ID NO: 15841 - DNA, 21 bp, Artificial Sequence
  Target HLA Sequence complement
tttgcccaagcccctcaccct

SEQ ID NO: 15842 - DNA, 21 bp, Artificial Sequence
  Target HLA Sequence complement
ttgcccaagcccctcaccctg

SEQ ID NO: 15843 - DNA, 21 bp, Artificial Sequence
  Target HLA Sequence complement
tgcccaagcccctcaccctga

SEQ ID NO: 15844 - DNA, 21 bp, Artificial Sequence
  Target HLA Sequence complement
gcccaagcccctcaccctgag

SEQ ID NO: 15845 - DNA, 21 bp, Artificial Sequence
  Target HLA Sequence complement
cccaagcccctcaccctgaga

SEQ ID NO: 15846 - DNA, 21 bp, Artificial Sequence
  Target HLA Sequence complement
ccaagcccctcaccctgagat

SEQ ID NO: 15847 - DNA, 21 bp, Artificial Sequence
  Target HLA Sequence complement
caagcccctcaccctgagatg

SEQ ID NO: 15848 - DNA, 21 bp, Artificial Sequence
  Target HLA Sequence complement
aagcccctcaccctgagatgg

SEQ ID NO: 15849 - DNA, 21 bp, Artificial Sequence
  Target HLA Sequence complement
agcccctcaccctgagatggg

SEQ ID NO: 15850 - DNA, 21 bp, Artificial Sequence
  Target HLA Sequence complement
gcccctcaccctgagatggga

SEQ ID NO: 15851 - DNA, 21 bp, Artificial Sequence
  Target HLA Sequence complement
cccctcaccctgagatgggag

SEQ ID NO: 15852 - DNA, 21 bp, Artificial Sequence
  Target HLA Sequence complement
ccctcaccctgagatgggagc

SEQ ID NO: 15853 - DNA, 21 bp, Artificial Sequence
  Target HLA Sequence complement
cctcaccctgagatgggagcc

SEQ ID NO: 15854 - DNA, 21 bp, Artificial Sequence
  Target HLA Sequence complement
ctcaccctgagatgggagccg

SEQ ID NO: 15855 - DNA, 21 bp, Artificial Sequence
  Target HLA Sequence complement
tcaccctgagatgggagccgt

SEQ ID NO: 15856 - DNA, 21 bp, Artificial Sequence
  Target HLA Sequence complement
caccctgagatgggagccgtc

SEQ ID NO: 15857 - DNA, 21 bp, Artificial Sequence
  Target HLA Sequence complement
accctgagatgggagccgtct

SEQ ID NO: 15858 - DNA, 21 bp, Artificial Sequence
  Target HLA Sequence complement
ccctgagatgggagccgtctt

SEQ ID NO: 15859 - DNA, 21 bp, Artificial Sequence
  Target HLA Sequence complement
cctgagatgggagccgtcttc

SEQ ID NO: 15860 - DNA, 21 bp, Artificial Sequence
  Target HLA Sequence complement
ctgagatgggagccgtcttcc

SEQ ID NO: 15861 - DNA, 21 bp, Artificial Sequence
  Target HLA Sequence complement
tgagatgggagccgtcttccc

SEQ ID NO: 15862 - DNA, 21 bp, Artificial Sequence
  Target HLA Sequence complement
gagatgggagccgtcttccca

SEQ ID NO: 15863 - DNA, 21 bp, Artificial Sequence
  Target HLA Sequence complement
agatgggagccgtcttcccag

SEQ ID NO: 15864 - DNA, 21 bp, Artificial Sequence
  Target HLA Sequence complement
gatgggagccgtcttcccagc

SEQ ID NO: 15865 - DNA, 21 bp, Artificial Sequence
  Target HLA Sequence complement
atgggagccgtcttcccagcc

SEQ ID NO: 15866 - DNA, 21 bp, Artificial Sequence
  Target HLA Sequence complement
tgggagccgtcttcccagccc

SEQ ID NO: 15867 - DNA, 21 bp, Artificial Sequence
  Target HLA Sequence complement
gggagccgtcttcccagccca

SEQ ID NO: 15868 - DNA, 21 bp, Artificial Sequence
  Target HLA Sequence complement
ggagccgtcttcccagcccac

SEQ ID NO: 15869 - DNA, 21 bp, Artificial Sequence
  Target HLA Sequence complement
gagccgtcttcccagcccacc

SEQ ID NO: 15870 - DNA, 21 bp, Artificial Sequence
  Target HLA Sequence complement
agccgtcttcccagcccacca

SEQ ID NO: 15871 - DNA, 21 bp, Artificial Sequence
  Target HLA Sequence complement
gccgtcttcccagcccaccat

SEQ ID NO: 15872 - DNA, 21 bp, Artificial Sequence
  Target HLA Sequence complement
ccgtcttcccagcccaccatc

SEQ ID NO: 15873 - DNA, 21 bp, Artificial Sequence
  Target HLA Sequence complement
cgtcttcccagcccaccatcc

SEQ ID NO: 15874 - DNA, 21 bp, Artificial Sequence
  Target HLA Sequence complement
gtcttcccagcccaccatccc

SEQ ID NO: 15875 - DNA, 21 bp, Artificial Sequence
  Target HLA Sequence complement
tcttcccagcccaccatcccc

SEQ ID NO: 15876 - DNA, 21 bp, Artificial Sequence
  Target HLA Sequence complement
cttcccagcccaccatcccca

SEQ ID NO: 15877 - DNA, 21 bp, Artificial Sequence
  Target HLA Sequence complement
ttcccagcccaccatccccat

SEQ ID NO: 15878 - DNA, 21 bp, Artificial Sequence
  Target HLA Sequence complement
tcccagcccaccatccccatc

SEQ ID NO: 15879 - DNA, 21 bp, Artificial Sequence
  Target HLA Sequence complement
cccagcccaccatccccatcg

SEQ ID NO: 15880 - DNA, 21 bp, Artificial Sequence
  Target HLA Sequence complement
ccagcccaccatccccatcgt

SEQ ID NO: 15881 - DNA, 21 bp, Artificial Sequence
  Target HLA Sequence complement
cagcccaccatccccatcgtg

SEQ ID NO: 15882 - DNA, 21 bp, Artificial Sequence
  Target HLA Sequence complement
agcccaccatccccatcgtgg

SEQ ID NO: 15883 - DNA, 21 bp, Artificial Sequence
  Target HLA Sequence complement
gcccaccatccccatcgtggg

SEQ ID NO: 15884 - DNA, 21 bp, Artificial Sequence
  Target HLA Sequence complement
cccaccatccccatcgtgggc

SEQ ID NO: 15885 - DNA, 21 bp, Artificial Sequence
  Target HLA Sequence complement
ccaccatccccatcgtgggca

SEQ ID NO: 15886 - DNA, 21 bp, Artificial Sequence
  Target HLA Sequence complement
caccatccccatcgtgggcat

SEQ ID NO: 15887 - DNA, 21 bp, Artificial Sequence
  Target HLA Sequence complement
accatccccatcgtgggcatc

SEQ ID NO: 15888 - DNA, 21 bp, Artificial Sequence
  Target HLA Sequence complement
ccatccccatcgtgggcatca

SEQ ID NO: 15889 - DNA, 21 bp, Artificial Sequence
  Target HLA Sequence complement
ccccatcgtgggcatcattgc

SEQ ID NO: 15890 - DNA, 21 bp, Artificial Sequence
  Target HLA Sequence complement
tcgtgggcatcattgctggcc

SEQ ID NO: 15891 - DNA, 21 bp, Artificial Sequence
  Target HLA Sequence complement
cgtgggcatcattgctggcct

SEQ ID NO: 15892 - DNA, 21 bp, Artificial Sequence
  Target HLA Sequence complement
gtgggcatcattgctggcctg

SEQ ID NO: 15893 - DNA, 21 bp, Artificial Sequence
  Target HLA Sequence complement
tgggcatcattgctggcctgg

SEQ ID NO: 15894 - DNA, 21 bp, Artificial Sequence
  Target HLA Sequence complement
gggcatcattgctggcctggt

SEQ ID NO: 15895 - DNA, 21 bp, Artificial Sequence
  Target HLA Sequence complement
gatcactggagctgtggtcgc

SEQ ID NO: 15896 - DNA, 21 bp, Artificial Sequence
  Target HLA Sequence complement
tcactggagctgtggtcgctg

SEQ ID NO: 15897 - DNA, 21 bp, Artificial Sequence
  Target HLA Sequence complement
cactggagctgtggtcgctgc

SEQ ID NO: 15898 - DNA, 21 bp, Artificial Sequence
  Target HLA Sequence complement
actggagctgtggtcgctgct

SEQ ID NO: 15899 - DNA, 21 bp, Artificial Sequence
  Target HLA Sequence complement
ctggagctgtggtcgctgctg

SEQ ID NO: 15900 - DNA, 21 bp, Artificial Sequence
  Target HLA Sequence complement
tggagctgtggtcgctgctgt

SEQ ID NO: 15901 - DNA, 21 bp, Artificial Sequence
  Target HLA Sequence complement
ggagctgtggtcgctgctgtg

SEQ ID NO: 15902 - DNA, 21 bp, Artificial Sequence
  Target HLA Sequence complement
gagctgtggtcgctgctgtga

SEQ ID NO: 15903 - DNA, 21 bp, Artificial Sequence
  Target HLA Sequence complement
gctgtggtcgctgctgtgatg

SEQ ID NO: 15904 - DNA, 21 bp, Artificial Sequence
  Target HLA Sequence complement
gtggtcgctgctgtgatgtgg

SEQ ID NO: 15905 - DNA, 21 bp, Artificial Sequence
  Target HLA Sequence complement
ggtcgctgctgtgatgtggag

SEQ ID NO: 15906 - DNA, 21 bp, Artificial Sequence
  Target HLA Sequence complement
gtcgctgctgtgatgtggagg

SEQ ID NO: 15907 - DNA, 21 bp, Artificial Sequence
  Target HLA Sequence complement
cgctgctgtgatgtggaggag

SEQ ID NO: 15908 - DNA, 21 bp, Artificial Sequence
  Target HLA Sequence complement
gctgctgtgatgtggaggagg

SEQ ID NO: 15909 - DNA, 21 bp, Artificial Sequence
  Target HLA Sequence complement
aggagggagctactctcaggc

SEQ ID NO: 15910 - DNA, 21 bp, Artificial Sequence
  Target HLA Sequence complement
ggagggagctactctcaggct

SEQ ID NO: 15911 - DNA, 21 bp, Artificial Sequence
  Target HLA Sequence complement
gagggagctactctcaggctg

SEQ ID NO: 15912 - DNA, 21 bp, Artificial Sequence
  Target HLA Sequence complement
agggagctactctcaggctgc

SEQ ID NO: 15913 - DNA, 21 bp, Artificial Sequence
  Target HLA Sequence complement
gggagctactctcaggctgca

SEQ ID NO: 15914 - DNA, 21 bp, Artificial Sequence
  Target HLA Sequence complement
ggctgcaagcagtgacagtgc

SEQ ID NO: 15915 - DNA, 21 bp, Artificial Sequence
  Target HLA Sequence complement
gctgcaagcagtgacagtgcc

SEQ ID NO: 15916 - DNA, 21 bp, Artificial Sequence
  Target HLA Sequence complement
ctgcaagcagtgacagtgccc

SEQ ID NO: 15917 - DNA, 21 bp, Artificial Sequence
  Target HLA Sequence complement
gcaagcagtgacagtgcccag

SEQ ID NO: 15918 - DNA, 21 bp, Artificial Sequence
  Target HLA Sequence complement
caagcagtgacagtgcccagg

SEQ ID NO: 15919 - DNA, 21 bp, Artificial Sequence
  Target HLA Sequence complement
aagcagtgacagtgcccaggg

SEQ ID NO: 15920 - DNA, 21 bp, Artificial Sequence
  Target HLA Sequence complement
agcagtgacagtgcccagggc

SEQ ID NO: 15921 - DNA, 21 bp, Artificial Sequence
  Target HLA Sequence complement
gcagtgacagtgcccagggct

SEQ ID NO: 15922 - DNA, 21 bp, Artificial Sequence
  Target HLA Sequence complement
cagtgacagtgcccagggctc

SEQ ID NO: 15923 - DNA, 21 bp, Artificial Sequence
  Target HLA Sequence complement
agtgacagtgcccagggctct

SEQ ID NO: 15924 - DNA, 21 bp, Artificial Sequence
  Target HLA Sequence complement
gtgacagtgcccagggctctg

SEQ ID NO: 15925 - DNA, 21 bp, Artificial Sequence
  Target HLA Sequence complement
tgacagtgcccagggctctga

SEQ ID NO: 15926 - DNA, 21 bp, Artificial Sequence
  Target HLA Sequence complement
gacagtgcccagggctctgat

SEQ ID NO: 15927 - DNA, 21 bp, Artificial Sequence
  Target HLA Sequence complement
acagtgcccagggctctgatg

SEQ ID NO: 15928 - DNA, 21 bp, Artificial Sequence
  Target HLA Sequence complement
cagtgcccagggctctgatgt

SEQ ID NO: 15929 - DNA, 21 bp, Artificial Sequence
  Target HLA Sequence complement
agtgcccagggctctgatgtg

SEQ ID NO: 15930 - DNA, 21 bp, Artificial Sequence
  Target HLA Sequence complement
gtgcccagggctctgatgtgt

SEQ ID NO: 15931 - DNA, 21 bp, Artificial Sequence
  Target HLA Sequence complement
tgcccagggctctgatgtgtc

SEQ ID NO: 15932 - DNA, 21 bp, Artificial Sequence
  Target HLA Sequence complement
gcccagggctctgatgtgtct

SEQ ID NO: 15933 - DNA, 21 bp, Artificial Sequence
  Target HLA Sequence complement
cccagggctctgatgtgtctc

SEQ ID NO: 15934 - DNA, 21 bp, Artificial Sequence
  Target HLA Sequence complement
gagacagctgccttgtgtggg

SEQ ID NO: 15935 - DNA, 21 bp, Artificial Sequence
  Target HLA Sequence complement
gacagctgccttgtgtgggac

SEQ ID NO: 15936 - DNA, 21 bp, Artificial Sequence
  Target HLA Sequence complement
cagctgccttgtgtgggactg

SEQ ID NO: 15937 - DNA, 21 bp, Artificial Sequence
  Target HLA Sequence complement
gctgccttgtgtgggactgag

SEQ ID NO: 15938 - DNA, 21 bp, Artificial Sequence
  Target HLA Sequence complement
gccttgtgtgggactgagagg

SEQ ID NO: 15939 - DNA, 21 bp, Artificial Sequence
  Target HLA Sequence complement
ccttgtgtgggactgagaggc

SEQ ID NO: 15940 - DNA, 21 bp, Artificial Sequence
  Target HLA Sequence complement
atgtgaggaggtggggagacc

SEQ ID NO: 15941 - DNA, 21 bp, Artificial Sequence
  Target HLA Sequence complement
tgtgaggaggtggggagacca

SEQ ID NO: 15942 - DNA, 21 bp, Artificial Sequence
  Target HLA Sequence complement
gtgaggaggtggggagaccac

SEQ ID NO: 15943 - DNA, 21 bp, Artificial Sequence
  Target HLA Sequence complement
tgaggaggtggggagaccacc

SEQ ID NO: 15944 - DNA, 21 bp, Artificial Sequence
  Target HLA Sequence complement
gaggaggtggggagaccaccc

SEQ ID NO: 15945 - DNA, 21 bp, Artificial Sequence
  Target HLA Sequence complement
aggaggtggggagaccacccc

SEQ ID NO: 15946 - DNA, 21 bp, Artificial Sequence
  Target HLA Sequence complement
ggaggtggggagaccacccca

SEQ ID NO: 15947 - DNA, 21 bp, Artificial Sequence
  Target HLA Sequence complement
gaggtggggagaccaccccac

SEQ ID NO: 15948 - DNA, 21 bp, Artificial Sequence
  Target HLA Sequence complement
aggtggggagaccaccccacc

SEQ ID NO: 15949 - DNA, 21 bp, Artificial Sequence
  Target HLA Sequence complement
ggtggggagaccaccccaccc

SEQ ID NO: 15950 - DNA, 21 bp, Artificial Sequence
  Target HLA Sequence complement
gtggggagaccaccccacccc

SEQ ID NO: 15951 - DNA, 21 bp, Artificial Sequence
  Target HLA Sequence complement
tggggagaccaccccaccccc

SEQ ID NO: 15952 - DNA, 21 bp, Artificial Sequence
  Target HLA Sequence complement
ggggagaccaccccaccccca

SEQ ID NO: 15953 - DNA, 21 bp, Artificial Sequence
  Target HLA Sequence complement
gggagaccaccccacccccat

SEQ ID NO: 15954 - DNA, 21 bp, Artificial Sequence
  Target HLA Sequence complement
ggagaccaccccacccccatg

SEQ ID NO: 15955 - DNA, 21 bp, Artificial Sequence
  Target HLA Sequence complement
gagaccaccccacccccatgt

SEQ ID NO: 15956 - DNA, 21 bp, Artificial Sequence
  Target HLA Sequence complement
agaccaccccacccccatgtc

SEQ ID NO: 15957 - DNA, 21 bp, Artificial Sequence
  Target HLA Sequence complement
gaccaccccacccccatgtcc

SEQ ID NO: 15958 - DNA, 21 bp, Artificial Sequence
  Target HLA Sequence complement
accaccccacccccatgtcca

SEQ ID NO: 15959 - DNA, 21 bp, Artificial Sequence
  Target HLA Sequence complement
ccaccccacccccatgtccac

SEQ ID NO: 15960 - DNA, 21 bp, Artificial Sequence
  Target HLA Sequence complement
caccccacccccatgtccacc

SEQ ID NO: 15961 - DNA, 21 bp, Artificial Sequence
  Target HLA Sequence complement
accccacccccatgtccacca

SEQ ID NO: 15962 - DNA, 21 bp, Artificial Sequence
  Target HLA Sequence complement
ccccacccccatgtccaccat

SEQ ID NO: 15963 - DNA, 21 bp, Artificial Sequence
  Target HLA Sequence complement
cccacccccatgtccaccatg

SEQ ID NO: 15964 - DNA, 21 bp, Artificial Sequence
  Target HLA Sequence complement
ccacccccatgtccaccatga

SEQ ID NO: 15965 - DNA, 21 bp, Artificial Sequence
  Target HLA Sequence complement
cacccccatgtccaccatgac

SEQ ID NO: 15966 - DNA, 21 bp, Artificial Sequence
  Target HLA Sequence complement
acccccatgtccaccatgacc

SEQ ID NO: 15967 - DNA, 21 bp, Artificial Sequence
  Target HLA Sequence complement
cccccatgtccaccatgaccc

SEQ ID NO: 15968 - DNA, 21 bp, Artificial Sequence
  Target HLA Sequence complement
ccccatgtccaccatgaccct

SEQ ID NO: 15969 - DNA, 21 bp, Artificial Sequence
  Target HLA Sequence complement
cccatgtccaccatgaccctc

SEQ ID NO: 15970 - DNA, 21 bp, Artificial Sequence
  Target HLA Sequence complement
gtccaccatgaccctcttccc

SEQ ID NO: 15971 - DNA, 21 bp, Artificial Sequence
  Target HLA Sequence complement
ccaccatgaccctcttcccac

SEQ ID NO: 15972 - DNA, 21 bp, Artificial Sequence
  Target HLA Sequence complement
caccatgaccctcttcccacg

SEQ ID NO: 15973 - DNA, 21 bp, Artificial Sequence
  Target HLA Sequence complement
accatgaccctcttcccacgc

SEQ ID NO: 15974 - DNA, 21 bp, Artificial Sequence
  Target HLA Sequence complement
ccatgaccctcttcccacgct

SEQ ID NO: 15975 - DNA, 21 bp, Artificial Sequence
  Target HLA Sequence complement
catgaccctcttcccacgctg

SEQ ID NO: 15976 - DNA, 21 bp, Artificial Sequence
  Target HLA Sequence complement
tgaccctcttcccacgctgac

SEQ ID NO: 15977 - DNA, 21 bp, Artificial Sequence
  Target HLA Sequence complement
gaccctcttcccacgctgacc

SEQ ID NO: 15978 - DNA, 21 bp, Artificial Sequence
  Target HLA Sequence complement
accctcttcccacgctgacct

SEQ ID NO: 15979 - DNA, 21 bp, Artificial Sequence
  Target HLA Sequence complement
ccctcttcccacgctgacctg

SEQ ID NO: 15980 - DNA, 21 bp, Artificial Sequence
  Target HLA Sequence complement
cctcttcccacgctgacctgt

SEQ ID NO: 15981 - DNA, 21 bp, Artificial Sequence
  Target HLA Sequence complement
ctcttcccacgctgacctgtg

SEQ ID NO: 15982 - DNA, 21 bp, Artificial Sequence
  Target HLA Sequence complement
tcttcccacgctgacctgtgc

SEQ ID NO: 15983 - DNA, 21 bp, Artificial Sequence
  Target HLA Sequence complement
cttcccacgctgacctgtgct

SEQ ID NO: 15984 - DNA, 21 bp, Artificial Sequence
  Target HLA Sequence complement
ttcccacgctgacctgtgctc

SEQ ID NO: 15985 - DNA, 21 bp, Artificial Sequence
  Target HLA Sequence complement
tcccacgctgacctgtgctcc

SEQ ID NO: 15986 - DNA, 21 bp, Artificial Sequence
  Target HLA Sequence complement
cccacgctgacctgtgctccc

SEQ ID NO: 15987 - DNA, 21 bp, Artificial Sequence
  Target HLA Sequence complement
ccacgctgacctgtgctccct

SEQ ID NO: 15988 - DNA, 21 bp, Artificial Sequence
  Target HLA Sequence complement
cacgctgacctgtgctccctc

SEQ ID NO: 15989 - DNA, 21 bp, Artificial Sequence
  Target HLA Sequence complement
acgctgacctgtgctccctcc

SEQ ID NO: 15990 - DNA, 21 bp, Artificial Sequence
  Target HLA Sequence complement
cgctgacctgtgctccctccc

SEQ ID NO: 15991 - DNA, 21 bp, Artificial Sequence
  Target HLA Sequence complement
gctgacctgtgctccctcccc

SEQ ID NO: 15992 - DNA, 21 bp, Artificial Sequence
  Target HLA Sequence complement
ctgacctgtgctccctcccca

SEQ ID NO: 15993 - DNA, 21 bp, Artificial Sequence
  Target HLA Sequence complement
tgacctgtgctccctccccaa

SEQ ID NO: 15994 - DNA, 21 bp, Artificial Sequence
  Target HLA Sequence complement
gacctgtgctccctccccaat

SEQ ID NO: 15995 - DNA, 21 bp, Artificial Sequence
  Target HLA Sequence complement
acctgtgctccctccccaatc

SEQ ID NO: 15996 - DNA, 21 bp, Artificial Sequence
  Target HLA Sequence complement
cctgtgctccctccccaatca

SEQ ID NO: 15997 - DNA, 21 bp, Artificial Sequence
  Target HLA Sequence complement
tcctgttccagagaggtgggg

SEQ ID NO: 15998 - DNA, 21 bp, Artificial Sequence
  Target HLA Sequence complement
cctgttccagagaggtggggc

SEQ ID NO: 15999 - DNA, 21 bp, Artificial Sequence
  Target HLA Sequence complement
ctgttccagagaggtggggct

SEQ ID NO: 16000 - DNA, 21 bp, Artificial Sequence
  Target HLA Sequence complement
tgttccagagaggtggggctg

SEQ ID NO: 16001 - DNA, 21 bp, Artificial Sequence
  Target HLA Sequence complement
gttccagagaggtggggctga

SEQ ID NO: 16002 - DNA, 21 bp, Artificial Sequence
  Target HLA Sequence complement
ttccagagaggtggggctgag

SEQ ID NO: 16003 - DNA, 21 bp, Artificial Sequence
  Target HLA Sequence complement
tccagagaggtggggctgagg

SEQ ID NO: 16004 - DNA, 21 bp, Artificial Sequence
  Target HLA Sequence complement
ccagagaggtggggctgaggt

SEQ ID NO: 16005 - DNA, 21 bp, Artificial Sequence
  Target HLA Sequence complement
cagagaggtggggctgaggtg

SEQ ID NO: 16006 - DNA, 21 bp, Artificial Sequence
  Target HLA Sequence complement
agagaggtggggctgaggtgt

SEQ ID NO: 16007 - DNA, 21 bp, Artificial Sequence
  Target HLA Sequence complement
gagaggtggggctgaggtgtc

SEQ ID NO: 16008 - DNA, 21 bp, Artificial Sequence
  Target HLA Sequence complement
agaggtggggctgaggtgtct

SEQ ID NO: 16009 - DNA, 21 bp, Artificial Sequence
  Target HLA Sequence complement
gaggtggggctgaggtgtctc

SEQ ID NO: 16010 - DNA, 21 bp, Artificial Sequence
  Target HLA Sequence complement
aggtggggctgaggtgtctcc

SEQ ID NO: 16011 - DNA, 21 bp, Artificial Sequence
  Target HLA Sequence complement
ggtggggctgaggtgtctcca

SEQ ID NO: 16012 - DNA, 21 bp, Artificial Sequence
  Target HLA Sequence complement
gtggggctgaggtgtctccat

SEQ ID NO: 16013 - DNA, 21 bp, Artificial Sequence
  Target HLA Sequence complement
tggggctgaggtgtctccatc

SEQ ID NO: 16014 - DNA, 21 bp, Artificial Sequence
  Target HLA Sequence complement
ggggctgaggtgtctccatct

SEQ ID NO: 16015 - DNA, 21 bp, Artificial Sequence
  Target HLA Sequence complement
gggctgaggtgtctccatctc

SEQ ID NO: 16016 - DNA, 22 bp, Artificial Sequence
  Target HLA Sequence complement
cagaagcagaggggtcagggcg

SEQ ID NO: 16017 - DNA, 22 bp, Artificial Sequence
  Target HLA Sequence complement
agaagcagaggggtcagggcga

SEQ ID NO: 16018 - DNA, 22 bp, Artificial Sequence
  Target HLA Sequence complement
gaagcagaggggtcagggcgaa

SEQ ID NO: 16019 - DNA, 22 bp, Artificial Sequence
  Target HLA Sequence complement
aagcagaggggtcagggcgaag

SEQ ID NO: 16020 - DNA, 22 bp, Artificial Sequence
  Target HLA Sequence complement
agcagaggggtcagggcgaagt

SEQ ID NO: 16021 - DNA, 22 bp, Artificial Sequence
  Target HLA Sequence complement
gcagaggggtcagggcgaagtc

SEQ ID NO: 16022 - DNA, 22 bp, Artificial Sequence
  Target HLA Sequence complement
cagaggggtcagggcgaagtcc

SEQ ID NO: 16023 - DNA, 22 bp, Artificial Sequence
  Target HLA Sequence complement
agaggggtcagggcgaagtccc

SEQ ID NO: 16024 - DNA, 22 bp, Artificial Sequence
  Target HLA Sequence complement
gaggggtcagggcgaagtccca

SEQ ID NO: 16025 - DNA, 22 bp, Artificial Sequence
  Target HLA Sequence complement
aggggtcagggcgaagtcccag

SEQ ID NO: 16026 - DNA, 22 bp, Artificial Sequence
  Target HLA Sequence complement
ggggtcagggcgaagtcccagg

SEQ ID NO: 16027 - DNA, 22 bp, Artificial Sequence
  Target HLA Sequence complement
gggtcagggcgaagtcccaggg

SEQ ID NO: 16028 - DNA, 22 bp, Artificial Sequence
  Target HLA Sequence complement
ggtcagggcgaagtcccagggc

SEQ ID NO: 16029 - DNA, 22 bp, Artificial Sequence
  Target HLA Sequence complement
gtcagggcgaagtcccagggcc

SEQ ID NO: 16030 - DNA, 22 bp, Artificial Sequence
  Target HLA Sequence complement
tcagggcgaagtcccagggccc

SEQ ID NO: 16031 - DNA, 22 bp, Artificial Sequence
  Target HLA Sequence complement
cagggcgaagtcccagggcccc

SEQ ID NO: 16032 - DNA, 22 bp, Artificial Sequence
  Target HLA Sequence complement
agggcgaagtcccagggcccca

SEQ ID NO: 16033 - DNA, 22 bp, Artificial Sequence
  Target HLA Sequence complement
gggcgaagtcccagggccccag

SEQ ID NO: 16034 - DNA, 22 bp, Artificial Sequence
  Target HLA Sequence complement
ggcgaagtcccagggccccagg

SEQ ID NO: 16035 - DNA, 22 bp, Artificial Sequence
  Target HLA Sequence complement
gcgaagtcccagggccccaggc

SEQ ID NO: 16036 - DNA, 22 bp, Artificial Sequence
  Target HLA Sequence complement
cgaagtcccagggccccaggcg

SEQ ID NO: 16037 - DNA, 22 bp, Artificial Sequence
  Target HLA Sequence complement
gaagtcccagggccccaggcgt

SEQ ID NO: 16038 - DNA, 22 bp, Artificial Sequence
  Target HLA Sequence complement
aagtcccagggccccaggcgtg

SEQ ID NO: 16039 - DNA, 22 bp, Artificial Sequence
  Target HLA Sequence complement
agtcccagggccccaggcgtgg

SEQ ID NO: 16040 - DNA, 22 bp, Artificial Sequence
  Target HLA Sequence complement
gtcccagggccccaggcgtggc

SEQ ID NO: 16041 - DNA, 22 bp, Artificial Sequence
  Target HLA Sequence complement
tcccagggccccaggcgtggct

SEQ ID NO: 16042 - DNA, 22 bp, Artificial Sequence
  Target HLA Sequence complement
cccagggccccaggcgtggctc

SEQ ID NO: 16043 - DNA, 22 bp, Artificial Sequence
  Target HLA Sequence complement
ccagggccccaggcgtggctct

SEQ ID NO: 16044 - DNA, 22 bp, Artificial Sequence
  Target HLA Sequence complement
cagggccccaggcgtggctctc

SEQ ID NO: 16045 - DNA, 22 bp, Artificial Sequence
  Target HLA Sequence complement
agggccccaggcgtggctctca

SEQ ID NO: 16046 - DNA, 22 bp, Artificial Sequence
  Target HLA Sequence complement
gggccccaggcgtggctctcag

SEQ ID NO: 16047 - DNA, 22 bp, Artificial Sequence
  Target HLA Sequence complement
ggccccaggcgtggctctcagg

SEQ ID NO: 16048 - DNA, 22 bp, Artificial Sequence
  Target HLA Sequence complement
gccccaggcgtggctctcaggg

SEQ ID NO: 16049 - DNA, 22 bp, Artificial Sequence
  Target HLA Sequence complement
ccccaggcgtggctctcagggt

SEQ ID NO: 16050 - DNA, 22 bp, Artificial Sequence
  Target HLA Sequence complement
cccaggcgtggctctcagggtc

SEQ ID NO: 16051 - DNA, 22 bp, Artificial Sequence
  Target HLA Sequence complement
ccaggcgtggctctcagggtct

SEQ ID NO: 16052 - DNA, 22 bp, Artificial Sequence
  Target HLA Sequence complement
caggcgtggctctcagggtctc

SEQ ID NO: 16053 - DNA, 22 bp, Artificial Sequence
  Target HLA Sequence complement
aggcgtggctctcagggtctca

SEQ ID NO: 16054 - DNA, 22 bp, Artificial Sequence
  Target HLA Sequence complement
ggcgtggctctcagggtctcag

SEQ ID NO: 16055 - DNA, 22 bp, Artificial Sequence
  Target HLA Sequence complement
gcgtggctctcagggtctcagg

SEQ ID NO: 16056 - DNA, 22 bp, Artificial Sequence
  Target HLA Sequence complement
cgtggctctcagggtctcaggc

SEQ ID NO: 16057 - DNA, 22 bp, Artificial Sequence
  Target HLA Sequence complement
gtggctctcagggtctcaggcc

SEQ ID NO: 16058 - DNA, 22 bp, Artificial Sequence
  Target HLA Sequence complement
tggctctcagggtctcaggccc

SEQ ID NO: 16059 - DNA, 22 bp, Artificial Sequence
  Target HLA Sequence complement
ggctctcagggtctcaggcccc

SEQ ID NO: 16060 - DNA, 22 bp, Artificial Sequence
  Target HLA Sequence complement
gctctcagggtctcaggccccg

SEQ ID NO: 16061 - DNA, 22 bp, Artificial Sequence
  Target HLA Sequence complement
ctctcagggtctcaggccccga

SEQ ID NO: 16062 - DNA, 22 bp, Artificial Sequence
  Target HLA Sequence complement
tctcagggtctcaggccccgaa

SEQ ID NO: 16063 - DNA, 22 bp, Artificial Sequence
  Target HLA Sequence complement
ctcagggtctcaggccccgaag

SEQ ID NO: 16064 - DNA, 22 bp, Artificial Sequence
  Target HLA Sequence complement
tcagggtctcaggccccgaagg

SEQ ID NO: 16065 - DNA, 22 bp, Artificial Sequence
  Target HLA Sequence complement
cagggtctcaggccccgaaggc

SEQ ID NO: 16066 - DNA, 22 bp, Artificial Sequence
  Target HLA Sequence complement
agggtctcaggccccgaaggcg

SEQ ID NO: 16067 - DNA, 22 bp, Artificial Sequence
  Target HLA Sequence complement
gggtctcaggccccgaaggcgg

SEQ ID NO: 16068 - DNA, 22 bp, Artificial Sequence
  Target HLA Sequence complement
ggtctcaggccccgaaggcggt

SEQ ID NO: 16069 - DNA, 22 bp, Artificial Sequence
  Target HLA Sequence complement
gtctcaggccccgaaggcggtg

SEQ ID NO: 16070 - DNA, 22 bp, Artificial Sequence
  Target HLA Sequence complement
tctcaggccccgaaggcggtgt

SEQ ID NO: 16071 - DNA, 22 bp, Artificial Sequence
  Target HLA Sequence complement
ctcaggccccgaaggcggtgta

SEQ ID NO: 16072 - DNA, 22 bp, Artificial Sequence
  Target HLA Sequence complement
tcaggccccgaaggcggtgtat

SEQ ID NO: 16073 - DNA, 22 bp, Artificial Sequence
  Target HLA Sequence complement
caggccccgaaggcggtgtatg

SEQ ID NO: 16074 - DNA, 22 bp, Artificial Sequence
  Target HLA Sequence complement
aggccccgaaggcggtgtatgg

SEQ ID NO: 16075 - DNA, 22 bp, Artificial Sequence
  Target HLA Sequence complement
ggccccgaaggcggtgtatgga

SEQ ID NO: 16076 - DNA, 22 bp, Artificial Sequence
  Target HLA Sequence complement
gccccgaaggcggtgtatggat

SEQ ID NO: 16077 - DNA, 22 bp, Artificial Sequence
  Target HLA Sequence complement
ggattggggagtcccagccttg

SEQ ID NO: 16078 - DNA, 22 bp, Artificial Sequence
  Target HLA Sequence complement
gattggggagtcccagccttgg

SEQ ID NO: 16079 - DNA, 22 bp, Artificial Sequence
  Target HLA Sequence complement
attggggagtcccagccttggg

SEQ ID NO: 16080 - DNA, 22 bp, Artificial Sequence
  Target HLA Sequence complement
ttggggagtcccagccttgggg

SEQ ID NO: 16081 - DNA, 22 bp, Artificial Sequence
  Target HLA Sequence complement
tggggagtcccagccttgggga

SEQ ID NO: 16082 - DNA, 22 bp, Artificial Sequence
  Target HLA Sequence complement
ggggagtcccagccttggggat

SEQ ID NO: 16083 - DNA, 22 bp, Artificial Sequence
  Target HLA Sequence complement
gggagtcccagccttggggatt

SEQ ID NO: 16084 - DNA, 22 bp, Artificial Sequence
  Target HLA Sequence complement
ggagtcccagccttggggattc

SEQ ID NO: 16085 - DNA, 22 bp, Artificial Sequence
  Target HLA Sequence complement
gagtcccagccttggggattcc

SEQ ID NO: 16086 - DNA, 22 bp, Artificial Sequence
  Target HLA Sequence complement
agtcccagccttggggattccc

SEQ ID NO: 16087 - DNA, 22 bp, Artificial Sequence
  Target HLA Sequence complement
gtcccagccttggggattcccc

SEQ ID NO: 16088 - DNA, 22 bp, Artificial Sequence
  Target HLA Sequence complement
tcccagccttggggattcccca

SEQ ID NO: 16089 - DNA, 22 bp, Artificial Sequence
  Target HLA Sequence complement
cccagccttggggattccccaa

SEQ ID NO: 16090 - DNA, 22 bp, Artificial Sequence
  Target HLA Sequence complement
ccagccttggggattccccaac

SEQ ID NO: 16091 - DNA, 22 bp, Artificial Sequence
  Target HLA Sequence complement
gccttggggattccccaactcc

SEQ ID NO: 16092 - DNA, 22 bp, Artificial Sequence
  Target HLA Sequence complement
ccttggggattccccaactccg

SEQ ID NO: 16093 - DNA, 22 bp, Artificial Sequence
  Target HLA Sequence complement
cttggggattccccaactccgc

SEQ ID NO: 16094 - DNA, 22 bp, Artificial Sequence
  Target HLA Sequence complement
tggggattccccaactccgcag

SEQ ID NO: 16095 - DNA, 22 bp, Artificial Sequence
  Target HLA Sequence complement
ggggattccccaactccgcagt

SEQ ID NO: 16096 - DNA, 22 bp, Artificial Sequence
  Target HLA Sequence complement
cctggatactcacgacgcggac

SEQ ID NO: 16097 - DNA, 22 bp, Artificial Sequence
  Target HLA Sequence complement
ctggatactcacgacgcggacc

SEQ ID NO: 16098 - DNA, 22 bp, Artificial Sequence
  Target HLA Sequence complement
tggatactcacgacgcggaccc

SEQ ID NO: 16099 - DNA, 22 bp, Artificial Sequence
  Target HLA Sequence complement
ggatactcacgacgcggaccca

SEQ ID NO: 16100 - DNA, 22 bp, Artificial Sequence
  Target HLA Sequence complement
gatactcacgacgcggacccag

SEQ ID NO: 16101 - DNA, 22 bp, Artificial Sequence
  Target HLA Sequence complement
actcacgacgcggacccagttc

SEQ ID NO: 16102 - DNA, 22 bp, Artificial Sequence
  Target HLA Sequence complement
ctcacgacgcggacccagttct

SEQ ID NO: 16103 - DNA, 22 bp, Artificial Sequence
  Target HLA Sequence complement
tcacgacgcggacccagttctc

SEQ ID NO: 16104 - DNA, 22 bp, Artificial Sequence
  Target HLA Sequence complement
cacgacgcggacccagttctca

SEQ ID NO: 16105 - DNA, 22 bp, Artificial Sequence
  Target HLA Sequence complement
acgacgcggacccagttctcac

SEQ ID NO: 16106 - DNA, 22 bp, Artificial Sequence
  Target HLA Sequence complement
cgacgcggacccagttctcact

SEQ ID NO: 16107 - DNA, 22 bp, Artificial Sequence
  Target HLA Sequence complement
gacgcggacccagttctcactc

SEQ ID NO: 16108 - DNA, 22 bp, Artificial Sequence
  Target HLA Sequence complement
acgcggacccagttctcactcc

SEQ ID NO: 16109 - DNA, 22 bp, Artificial Sequence
  Target HLA Sequence complement
cgcggacccagttctcactccc

SEQ ID NO: 16110 - DNA, 22 bp, Artificial Sequence
  Target HLA Sequence complement
gcggacccagttctcactccca

SEQ ID NO: 16111 - DNA, 22 bp, Artificial Sequence
  Target HLA Sequence complement
ctcactcccattgggtgtcggg

SEQ ID NO: 16112 - DNA, 22 bp, Artificial Sequence
  Target HLA Sequence complement
gccaatcagtgtcgtcgcggtc

SEQ ID NO: 16113 - DNA, 22 bp, Artificial Sequence
  Target HLA Sequence complement
ccaatcagtgtcgtcgcggtcg

SEQ ID NO: 16114 - DNA, 22 bp, Artificial Sequence
  Target HLA Sequence complement
caatcagtgtcgtcgcggtcgc

SEQ ID NO: 16115 - DNA, 22 bp, Artificial Sequence
  Target HLA Sequence complement
aatcagtgtcgtcgcggtcgcg

SEQ ID NO: 16116 - DNA, 22 bp, Artificial Sequence
  Target HLA Sequence complement
atcagtgtcgtcgcggtcgcgg

SEQ ID NO: 16117 - DNA, 22 bp, Artificial Sequence
  Target HLA Sequence complement
tcagtgtcgtcgcggtcgcggt

SEQ ID NO: 16118 - DNA, 22 bp, Artificial Sequence
  Target HLA Sequence complement
cagtgtcgtcgcggtcgcggtt

SEQ ID NO: 16119 - DNA, 22 bp, Artificial Sequence
  Target HLA Sequence complement
agtgtcgtcgcggtcgcggttc

SEQ ID NO: 16120 - DNA, 22 bp, Artificial Sequence
  Target HLA Sequence complement
gtgtcgtcgcggtcgcggttct

SEQ ID NO: 16121 - DNA, 22 bp, Artificial Sequence
  Target HLA Sequence complement
tgtcgtcgcggtcgcggttcta

SEQ ID NO: 16122 - DNA, 22 bp, Artificial Sequence
  Target HLA Sequence complement
gtcgtcgcggtcgcggttctaa

SEQ ID NO: 16123 - DNA, 22 bp, Artificial Sequence
  Target HLA Sequence complement
cgtcgcggtcgcggttctaaag

SEQ ID NO: 16124 - DNA, 22 bp, Artificial Sequence
  Target HLA Sequence complement
cgcggtcgcggttctaaagtcc

SEQ ID NO: 16125 - DNA, 22 bp, Artificial Sequence
  Target HLA Sequence complement
gcggtcgcggttctaaagtccg

SEQ ID NO: 16126 - DNA, 22 bp, Artificial Sequence
  Target HLA Sequence complement
cggtcgcggttctaaagtccgc

SEQ ID NO: 16127 - DNA, 22 bp, Artificial Sequence
  Target HLA Sequence complement
cgcggttctaaagtccgcacgc

SEQ ID NO: 16128 - DNA, 22 bp, Artificial Sequence
  Target HLA Sequence complement
ctaaagtccgcacgcacccacc

SEQ ID NO: 16129 - DNA, 22 bp, Artificial Sequence
  Target HLA Sequence complement
taaagtccgcacgcacccaccg

SEQ ID NO: 16130 - DNA, 22 bp, Artificial Sequence
  Target HLA Sequence complement
aaagtccgcacgcacccaccgg

SEQ ID NO: 16131 - DNA, 22 bp, Artificial Sequence
  Target HLA Sequence complement
aagtccgcacgcacccaccggg

SEQ ID NO: 16132 - DNA, 22 bp, Artificial Sequence
  Target HLA Sequence complement
agtccgcacgcacccaccggga

SEQ ID NO: 16133 - DNA, 22 bp, Artificial Sequence
  Target HLA Sequence complement
gtccgcacgcacccaccgggac

SEQ ID NO: 16134 - DNA, 22 bp, Artificial Sequence
  Target HLA Sequence complement
tccgcacgcacccaccgggact

SEQ ID NO: 16135 - DNA, 22 bp, Artificial Sequence
  Target HLA Sequence complement
ccgcacgcacccaccgggactc

SEQ ID NO: 16136 - DNA, 22 bp, Artificial Sequence
  Target HLA Sequence complement
cgcacgcacccaccgggactca

SEQ ID NO: 16137 - DNA, 22 bp, Artificial Sequence
  Target HLA Sequence complement
gcacgcacccaccgggactcag

SEQ ID NO: 16138 - DNA, 22 bp, Artificial Sequence
  Target HLA Sequence complement
cacgcacccaccgggactcaga

SEQ ID NO: 16139 - DNA, 22 bp, Artificial Sequence
  Target HLA Sequence complement
acgcacccaccgggactcagat

SEQ ID NO: 16140 - DNA, 22 bp, Artificial Sequence
  Target HLA Sequence complement
cgcacccaccgggactcagatt

SEQ ID NO: 16141 - DNA, 22 bp, Artificial Sequence
  Target HLA Sequence complement
gcacccaccgggactcagattc

SEQ ID NO: 16142 - DNA, 22 bp, Artificial Sequence
  Target HLA Sequence complement
cccaccgggactcagattctcc

SEQ ID NO: 16143 - DNA, 22 bp, Artificial Sequence
  Target HLA Sequence complement
ccaccgggactcagattctccc

SEQ ID NO: 16144 - DNA, 22 bp, Artificial Sequence
  Target HLA Sequence complement
caccgggactcagattctcccc

SEQ ID NO: 16145 - DNA, 22 bp, Artificial Sequence
  Target HLA Sequence complement
ccgggactcagattctccccag

SEQ ID NO: 16146 - DNA, 22 bp, Artificial Sequence
  Target HLA Sequence complement
ctcagattctccccagacgccg

SEQ ID NO: 16147 - DNA, 22 bp, Artificial Sequence
  Target HLA Sequence complement
cagattctccccagacgccgag

SEQ ID NO: 16148 - DNA, 22 bp, Artificial Sequence
  Target HLA Sequence complement
agattctccccagacgccgagg

SEQ ID NO: 16149 - DNA, 22 bp, Artificial Sequence
  Target HLA Sequence complement
gattctccccagacgccgagga

SEQ ID NO: 16150 - DNA, 22 bp, Artificial Sequence
  Target HLA Sequence complement
ttctccccagacgccgaggatg

SEQ ID NO: 16151 - DNA, 22 bp, Artificial Sequence
  Target HLA Sequence complement
tctccccagacgccgaggatgg

SEQ ID NO: 16152 - DNA, 22 bp, Artificial Sequence
  Target HLA Sequence complement
ctccccagacgccgaggatggc

SEQ ID NO: 16153 - DNA, 22 bp, Artificial Sequence
  Target HLA Sequence complement
tccccagacgccgaggatggcc

SEQ ID NO: 16154 - DNA, 22 bp, Artificial Sequence
  Target HLA Sequence complement
ccccagacgccgaggatggccg

SEQ ID NO: 16155 - DNA, 22 bp, Artificial Sequence
  Target HLA Sequence complement
cccagacgccgaggatggccgt

SEQ ID NO: 16156 - DNA, 22 bp, Artificial Sequence
  Target HLA Sequence complement
ccagacgccgaggatggccgtc

SEQ ID NO: 16157 - DNA, 22 bp, Artificial Sequence
  Target HLA Sequence complement
cagacgccgaggatggccgtca

SEQ ID NO: 16158 - DNA, 22 bp, Artificial Sequence
  Target HLA Sequence complement
agacgccgaggatggccgtcat

SEQ ID NO: 16159 - DNA, 22 bp, Artificial Sequence
  Target HLA Sequence complement
gacgccgaggatggccgtcatg

SEQ ID NO: 16160 - DNA, 22 bp, Artificial Sequence
  Target HLA Sequence complement
acgccgaggatggccgtcatgg

SEQ ID NO: 16161 - DNA, 22 bp, Artificial Sequence
  Target HLA Sequence complement
cgccgaggatggccgtcatggc

SEQ ID NO: 16162 - DNA, 22 bp, Artificial Sequence
  Target HLA Sequence complement
gccgaggatggccgtcatggcg

SEQ ID NO: 16163 - DNA, 22 bp, Artificial Sequence
  Target HLA Sequence complement
ccgaggatggccgtcatggcgc

SEQ ID NO: 16164 - DNA, 22 bp, Artificial Sequence
  Target HLA Sequence complement
cgaggatggccgtcatggcgcc

SEQ ID NO: 16165 - DNA, 22 bp, Artificial Sequence
  Target HLA Sequence complement
gaggatggccgtcatggcgccc

SEQ ID NO: 16166 - DNA, 22 bp, Artificial Sequence
  Target HLA Sequence complement
aggatggccgtcatggcgcccc

SEQ ID NO: 16167 - DNA, 22 bp, Artificial Sequence
  Target HLA Sequence complement
ggatggccgtcatggcgccccg

SEQ ID NO: 16168 - DNA, 22 bp, Artificial Sequence
  Target HLA Sequence complement
gatggccgtcatggcgccccga

SEQ ID NO: 16169 - DNA, 22 bp, Artificial Sequence
  Target HLA Sequence complement
atggccgtcatggcgccccgaa

SEQ ID NO: 16170 - DNA, 22 bp, Artificial Sequence
  Target HLA Sequence complement
tggccgtcatggcgccccgaac

SEQ ID NO: 16171 - DNA, 22 bp, Artificial Sequence
  Target HLA Sequence complement
ggccgtcatggcgccccgaacc

SEQ ID NO: 16172 - DNA, 22 bp, Artificial Sequence
  Target HLA Sequence complement
gccgtcatggcgccccgaaccc

SEQ ID NO: 16173 - DNA, 22 bp, Artificial Sequence
  Target HLA Sequence complement
ccgtcatggcgccccgaaccct

SEQ ID NO: 16174 - DNA, 22 bp, Artificial Sequence
  Target HLA Sequence complement
cgtcatggcgccccgaaccctc

SEQ ID NO: 16175 - DNA, 22 bp, Artificial Sequence
  Target HLA Sequence complement
gtcatggcgccccgaaccctcg

SEQ ID NO: 16176 - DNA, 22 bp, Artificial Sequence
  Target HLA Sequence complement
tcatggcgccccgaaccctcgt

SEQ ID NO: 16177 - DNA, 22 bp, Artificial Sequence
  Target HLA Sequence complement
catggcgccccgaaccctcgtc

SEQ ID NO: 16178 - DNA, 22 bp, Artificial Sequence
  Target HLA Sequence complement
atggcgccccgaaccctcgtcc

SEQ ID NO: 16179 - DNA, 22 bp, Artificial Sequence
  Target HLA Sequence complement
tggcgccccgaaccctcgtcct

SEQ ID NO: 16180 - DNA, 22 bp, Artificial Sequence
  Target HLA Sequence complement
ggcgccccgaaccctcgtcctg

SEQ ID NO: 16181 - DNA, 22 bp, Artificial Sequence
  Target HLA Sequence complement
gcgccccgaaccctcgtcctgc

SEQ ID NO: 16182 - DNA, 22 bp, Artificial Sequence
  Target HLA Sequence complement
cgccccgaaccctcgtcctgct

SEQ ID NO: 16183 - DNA, 22 bp, Artificial Sequence
  Target HLA Sequence complement
gccccgaaccctcgtcctgcta

SEQ ID NO: 16184 - DNA, 22 bp, Artificial Sequence
  Target HLA Sequence complement
ccccgaaccctcgtcctgctac

SEQ ID NO: 16185 - DNA, 22 bp, Artificial Sequence
  Target HLA Sequence complement
cccgaaccctcgtcctgctact

SEQ ID NO: 16186 - DNA, 22 bp, Artificial Sequence
  Target HLA Sequence complement
ccgaaccctcgtcctgctactc

SEQ ID NO: 16187 - DNA, 22 bp, Artificial Sequence
  Target HLA Sequence complement
accctcgtcctgctactctcgg

SEQ ID NO: 16188 - DNA, 22 bp, Artificial Sequence
  Target HLA Sequence complement
ccctcgtcctgctactctcggg

SEQ ID NO: 16189 - DNA, 22 bp, Artificial Sequence
  Target HLA Sequence complement
cctcgtcctgctactctcgggg

SEQ ID NO: 16190 - DNA, 22 bp, Artificial Sequence
  Target HLA Sequence complement
ctcgtcctgctactctcggggg

SEQ ID NO: 16191 - DNA, 22 bp, Artificial Sequence
  Target HLA Sequence complement
tcgtcctgctactctcgggggc

SEQ ID NO: 16192 - DNA, 22 bp, Artificial Sequence
  Target HLA Sequence complement
cgtcctgctactctcgggggct

SEQ ID NO: 16193 - DNA, 22 bp, Artificial Sequence
  Target HLA Sequence complement
gtcctgctactctcgggggctc

SEQ ID NO: 16194 - DNA, 22 bp, Artificial Sequence
  Target HLA Sequence complement
tcctgctactctcgggggctct

SEQ ID NO: 16195 - DNA, 22 bp, Artificial Sequence
  Target HLA Sequence complement
cctgctactctcgggggctctg

SEQ ID NO: 16196 - DNA, 22 bp, Artificial Sequence
  Target HLA Sequence complement
ctgctactctcgggggctctgg

SEQ ID NO: 16197 - DNA, 22 bp, Artificial Sequence
  Target HLA Sequence complement
tgctactctcgggggctctggc

SEQ ID NO: 16198 - DNA, 22 bp, Artificial Sequence
  Target HLA Sequence complement
gctactctcgggggctctggcc

SEQ ID NO: 16199 - DNA, 22 bp, Artificial Sequence
  Target HLA Sequence complement
ctactctcgggggctctggccc

SEQ ID NO: 16200 - DNA, 22 bp, Artificial Sequence
  Target HLA Sequence complement
tactctcgggggctctggccct

SEQ ID NO: 16201 - DNA, 22 bp, Artificial Sequence
  Target HLA Sequence complement
actctcgggggctctggccctg

SEQ ID NO: 16202 - DNA, 22 bp, Artificial Sequence
  Target HLA Sequence complement
ctctcgggggctctggccctga

SEQ ID NO: 16203 - DNA, 22 bp, Artificial Sequence
  Target HLA Sequence complement
tctcgggggctctggccctgac

SEQ ID NO: 16204 - DNA, 22 bp, Artificial Sequence
  Target HLA Sequence complement
ctcgggggctctggccctgacc

SEQ ID NO: 16205 - DNA, 22 bp, Artificial Sequence
  Target HLA Sequence complement
tcgggggctctggccctgaccc

SEQ ID NO: 16206 - DNA, 22 bp, Artificial Sequence
  Target HLA Sequence complement
cgggggctctggccctgaccca

SEQ ID NO: 16207 - DNA, 22 bp, Artificial Sequence
  Target HLA Sequence complement
gggggctctggccctgacccag

SEQ ID NO: 16208 - DNA, 22 bp, Artificial Sequence
  Target HLA Sequence complement
ggggctctggccctgacccaga

SEQ ID NO: 16209 - DNA, 22 bp, Artificial Sequence
  Target HLA Sequence complement
gggctctggccctgacccagac

SEQ ID NO: 16210 - DNA, 22 bp, Artificial Sequence
  Target HLA Sequence complement
ggctctggccctgacccagacc

SEQ ID NO: 16211 - DNA, 22 bp, Artificial Sequence
  Target HLA Sequence complement
gctctggccctgacccagacct

SEQ ID NO: 16212 - DNA, 22 bp, Artificial Sequence
  Target HLA Sequence complement
ctctggccctgacccagacctg

SEQ ID NO: 16213 - DNA, 22 bp, Artificial Sequence
  Target HLA Sequence complement
tctggccctgacccagacctgg

SEQ ID NO: 16214 - DNA, 22 bp, Artificial Sequence
  Target HLA Sequence complement
ctggccctgacccagacctggg

SEQ ID NO: 16215 - DNA, 22 bp, Artificial Sequence
  Target HLA Sequence complement
tggccctgacccagacctgggc

SEQ ID NO: 16216 - DNA, 22 bp, Artificial Sequence
  Target HLA Sequence complement
ggccctgacccagacctgggcg

SEQ ID NO: 16217 - DNA, 22 bp, Artificial Sequence
  Target HLA Sequence complement
gccctgacccagacctgggcgg

SEQ ID NO: 16218 - DNA, 22 bp, Artificial Sequence
  Target HLA Sequence complement
ccctgacccagacctgggcggg

SEQ ID NO: 16219 - DNA, 22 bp, Artificial Sequence
  Target HLA Sequence complement
cctgacccagacctgggcgggc

SEQ ID NO: 16220 - DNA, 22 bp, Artificial Sequence
  Target HLA Sequence complement
ctgacccagacctgggcgggct

SEQ ID NO: 16221 - DNA, 22 bp, Artificial Sequence
  Target HLA Sequence complement
tgacccagacctgggcgggctc

SEQ ID NO: 16222 - DNA, 22 bp, Artificial Sequence
  Target HLA Sequence complement
gacccagacctgggcgggctct

SEQ ID NO: 16223 - DNA, 22 bp, Artificial Sequence
  Target HLA Sequence complement
acccagacctgggcgggctctc

SEQ ID NO: 16224 - DNA, 22 bp, Artificial Sequence
  Target HLA Sequence complement
cccagacctgggcgggctctca

SEQ ID NO: 16225 - DNA, 22 bp, Artificial Sequence
  Target HLA Sequence complement
ccagacctgggcgggctctcac

SEQ ID NO: 16226 - DNA, 22 bp, Artificial Sequence
  Target HLA Sequence complement
cagacctgggcgggctctcact

SEQ ID NO: 16227 - DNA, 22 bp, Artificial Sequence
  Target HLA Sequence complement
agacctgggcgggctctcactc

SEQ ID NO: 16228 - DNA, 22 bp, Artificial Sequence
  Target HLA Sequence complement
gacctgggcgggctctcactcc

SEQ ID NO: 16229 - DNA, 22 bp, Artificial Sequence
  Target HLA Sequence complement
acctgggcgggctctcactcca

SEQ ID NO: 16230 - DNA, 22 bp, Artificial Sequence
  Target HLA Sequence complement
cctgggcgggctctcactccat

SEQ ID NO: 16231 - DNA, 22 bp, Artificial Sequence
  Target HLA Sequence complement
ctgggcgggctctcactccatg

SEQ ID NO: 16232 - DNA, 22 bp, Artificial Sequence
  Target HLA Sequence complement
tgggcgggctctcactccatga

SEQ ID NO: 16233 - DNA, 22 bp, Artificial Sequence
  Target HLA Sequence complement
gggcgggctctcactccatgag

SEQ ID NO: 16234 - DNA, 22 bp, Artificial Sequence
  Target HLA Sequence complement
ggcgggctctcactccatgagg

SEQ ID NO: 16235 - DNA, 22 bp, Artificial Sequence
  Target HLA Sequence complement
gcgggctctcactccatgaggt

SEQ ID NO: 16236 - DNA, 22 bp, Artificial Sequence
  Target HLA Sequence complement
tcttcacatccgtgtcccggcc

SEQ ID NO: 16237 - DNA, 22 bp, Artificial Sequence
  Target HLA Sequence complement
cttcacatccgtgtcccggccc

SEQ ID NO: 16238 - DNA, 22 bp, Artificial Sequence
  Target HLA Sequence complement
ttcacatccgtgtcccggcccg

SEQ ID NO: 16239 - DNA, 22 bp, Artificial Sequence
  Target HLA Sequence complement
tcacatccgtgtcccggcccgg

SEQ ID NO: 16240 - DNA, 22 bp, Artificial Sequence
  Target HLA Sequence complement
cacatccgtgtcccggcccggc

SEQ ID NO: 16241 - DNA, 22 bp, Artificial Sequence
  Target HLA Sequence complement
acatccgtgtcccggcccggcc

SEQ ID NO: 16242 - DNA, 22 bp, Artificial Sequence
  Target HLA Sequence complement
catccgtgtcccggcccggccg

SEQ ID NO: 16243 - DNA, 22 bp, Artificial Sequence
  Target HLA Sequence complement
atccgtgtcccggcccggccgc

SEQ ID NO: 16244 - DNA, 22 bp, Artificial Sequence
  Target HLA Sequence complement
tccgtgtcccggcccggccgcg

SEQ ID NO: 16245 - DNA, 22 bp, Artificial Sequence
  Target HLA Sequence complement
ccgtgtcccggcccggccgcgg

SEQ ID NO: 16246 - DNA, 22 bp, Artificial Sequence
  Target HLA Sequence complement
cgtgtcccggcccggccgcggg

SEQ ID NO: 16247 - DNA, 22 bp, Artificial Sequence
  Target HLA Sequence complement
gtgtcccggcccggccgcgggg

SEQ ID NO: 16248 - DNA, 22 bp, Artificial Sequence
  Target HLA Sequence complement
tgtcccggcccggccgcgggga

SEQ ID NO: 16249 - DNA, 22 bp, Artificial Sequence
  Target HLA Sequence complement
gtcccggcccggccgcggggag

SEQ ID NO: 16250 - DNA, 22 bp, Artificial Sequence
  Target HLA Sequence complement
tcccggcccggccgcggggagc

SEQ ID NO: 16251 - DNA, 22 bp, Artificial Sequence
  Target HLA Sequence complement
cccggcccggccgcggggagcc

SEQ ID NO: 16252 - DNA, 22 bp, Artificial Sequence
  Target HLA Sequence complement
ccggcccggccgcggggagccc

SEQ ID NO: 16253 - DNA, 22 bp, Artificial Sequence
  Target HLA Sequence complement
cggcccggccgcggggagcccc

SEQ ID NO: 16254 - DNA, 22 bp, Artificial Sequence
  Target HLA Sequence complement
ggcccggccgcggggagccccg

SEQ ID NO: 16255 - DNA, 22 bp, Artificial Sequence
  Target HLA Sequence complement
gcccggccgcggggagccccgc

SEQ ID NO: 16256 - DNA, 22 bp, Artificial Sequence
  Target HLA Sequence complement
cccggccgcggggagccccgct

SEQ ID NO: 16257 - DNA, 22 bp, Artificial Sequence
  Target HLA Sequence complement
ccggccgcggggagccccgctt

SEQ ID NO: 16258 - DNA, 22 bp, Artificial Sequence
  Target HLA Sequence complement
cggccgcggggagccccgcttc

SEQ ID NO: 16259 - DNA, 22 bp, Artificial Sequence
  Target HLA Sequence complement
ggccgcggggagccccgcttca

SEQ ID NO: 16260 - DNA, 22 bp, Artificial Sequence
  Target HLA Sequence complement
gccgcggggagccccgcttcat

SEQ ID NO: 16261 - DNA, 22 bp, Artificial Sequence
  Target HLA Sequence complement
ccgcggggagccccgcttcatc

SEQ ID NO: 16262 - DNA, 22 bp, Artificial Sequence
  Target HLA Sequence complement
cgcggggagccccgcttcatcg

SEQ ID NO: 16263 - DNA, 22 bp, Artificial Sequence
  Target HLA Sequence complement
gcggggagccccgcttcatcgc

SEQ ID NO: 16264 - DNA, 22 bp, Artificial Sequence
  Target HLA Sequence complement
cggggagccccgcttcatcgca

SEQ ID NO: 16265 - DNA, 22 bp, Artificial Sequence
  Target HLA Sequence complement
ggggagccccgcttcatcgcag

SEQ ID NO: 16266 - DNA, 22 bp, Artificial Sequence
  Target HLA Sequence complement
gggagccccgcttcatcgcagt

SEQ ID NO: 16267 - DNA, 22 bp, Artificial Sequence
  Target HLA Sequence complement
ggagccccgcttcatcgcagtg

SEQ ID NO: 16268 - DNA, 22 bp, Artificial Sequence
  Target HLA Sequence complement
gagccccgcttcatcgcagtgg

SEQ ID NO: 16269 - DNA, 22 bp, Artificial Sequence
  Target HLA Sequence complement
agccccgcttcatcgcagtggg

SEQ ID NO: 16270 - DNA, 22 bp, Artificial Sequence
  Target HLA Sequence complement
gccccgcttcatcgcagtgggc

SEQ ID NO: 16271 - DNA, 22 bp, Artificial Sequence
  Target HLA Sequence complement
ccccgcttcatcgcagtgggct

SEQ ID NO: 16272 - DNA, 22 bp, Artificial Sequence
  Target HLA Sequence complement
cccgcttcatcgcagtgggcta

SEQ ID NO: 16273 - DNA, 22 bp, Artificial Sequence
  Target HLA Sequence complement
ccgcttcatcgcagtgggctac

SEQ ID NO: 16274 - DNA, 22 bp, Artificial Sequence
  Target HLA Sequence complement
cgcttcatcgcagtgggctacg

SEQ ID NO: 16275 - DNA, 22 bp, Artificial Sequence
  Target HLA Sequence complement
catcgcagtgggctacgtggac

SEQ ID NO: 16276 - DNA, 22 bp, Artificial Sequence
  Target HLA Sequence complement
atcgcagtgggctacgtggacg

SEQ ID NO: 16277 - DNA, 22 bp, Artificial Sequence
  Target HLA Sequence complement
tcgcagtgggctacgtggacga

SEQ ID NO: 16278 - DNA, 22 bp, Artificial Sequence
  Target HLA Sequence complement
cgcagtgggctacgtggacgac

SEQ ID NO: 16279 - DNA, 22 bp, Artificial Sequence
  Target HLA Sequence complement
gcagtgggctacgtggacgaca

SEQ ID NO: 16280 - DNA, 22 bp, Artificial Sequence
  Target HLA Sequence complement
cagtgggctacgtggacgacac

SEQ ID NO: 16281 - DNA, 22 bp, Artificial Sequence
  Target HLA Sequence complement
agtgggctacgtggacgacacg

SEQ ID NO: 16282 - DNA, 22 bp, Artificial Sequence
  Target HLA Sequence complement
gtgggctacgtggacgacacgc

SEQ ID NO: 16283 - DNA, 22 bp, Artificial Sequence
  Target HLA Sequence complement
tgggctacgtggacgacacgca

SEQ ID NO: 16284 - DNA, 22 bp, Artificial Sequence
  Target HLA Sequence complement
gggctacgtggacgacacgcag

SEQ ID NO: 16285 - DNA, 22 bp, Artificial Sequence
  Target HLA Sequence complement
ggctacgtggacgacacgcagt

SEQ ID NO: 16286 - DNA, 22 bp, Artificial Sequence
  Target HLA Sequence complement
cgtggacgacacgcagttcgtg

SEQ ID NO: 16287 - DNA, 22 bp, Artificial Sequence
  Target HLA Sequence complement
gtggacgacacgcagttcgtgc

SEQ ID NO: 16288 - DNA, 22 bp, Artificial Sequence
  Target HLA Sequence complement
tggacgacacgcagttcgtgcg

SEQ ID NO: 16289 - DNA, 22 bp, Artificial Sequence
  Target HLA Sequence complement
ggacgacacgcagttcgtgcgg

SEQ ID NO: 16290 - DNA, 22 bp, Artificial Sequence
  Target HLA Sequence complement
gacgacacgcagttcgtgcggt

SEQ ID NO: 16291 - DNA, 22 bp, Artificial Sequence
  Target HLA Sequence complement
cgacacgcagttcgtgcggttc

SEQ ID NO: 16292 - DNA, 22 bp, Artificial Sequence
  Target HLA Sequence complement
gacacgcagttcgtgcggttcg

SEQ ID NO: 16293 - DNA, 22 bp, Artificial Sequence
  Target HLA Sequence complement
cacgcagttcgtgcggttcgac

SEQ ID NO: 16294 - DNA, 22 bp, Artificial Sequence
  Target HLA Sequence complement
cgcagttcgtgcggttcgacag

SEQ ID NO: 16295 - DNA, 22 bp, Artificial Sequence
  Target HLA Sequence complement
gcagttcgtgcggttcgacagc

SEQ ID NO: 16296 - DNA, 22 bp, Artificial Sequence
  Target HLA Sequence complement
cagttcgtgcggttcgacagcg

SEQ ID NO: 16297 - DNA, 22 bp, Artificial Sequence
  Target HLA Sequence complement
gttcgtgcggttcgacagcgac

SEQ ID NO: 16298 - DNA, 22 bp, Artificial Sequence
  Target HLA Sequence complement
ttcgtgcggttcgacagcgacg

SEQ ID NO: 16299 - DNA, 22 bp, Artificial Sequence
  Target HLA Sequence complement
tcgtgcggttcgacagcgacgc

SEQ ID NO: 16300 - DNA, 22 bp, Artificial Sequence
  Target HLA Sequence complement
cgtgcggttcgacagcgacgcc

SEQ ID NO: 16301 - DNA, 22 bp, Artificial Sequence
  Target HLA Sequence complement
gtgcggttcgacagcgacgccg

SEQ ID NO: 16302 - DNA, 22 bp, Artificial Sequence
  Target HLA Sequence complement
tgcggttcgacagcgacgccgc

SEQ ID NO: 16303 - DNA, 22 bp, Artificial Sequence
  Target HLA Sequence complement
gcggttcgacagcgacgccgcg

SEQ ID NO: 16304 - DNA, 22 bp, Artificial Sequence
  Target HLA Sequence complement
cggttcgacagcgacgccgcga

SEQ ID NO: 16305 - DNA, 22 bp, Artificial Sequence
  Target HLA Sequence complement
ggttcgacagcgacgccgcgag

SEQ ID NO: 16306 - DNA, 22 bp, Artificial Sequence
  Target HLA Sequence complement
gttcgacagcgacgccgcgagc

SEQ ID NO: 16307 - DNA, 22 bp, Artificial Sequence
  Target HLA Sequence complement
ttcgacagcgacgccgcgagcc

SEQ ID NO: 16308 - DNA, 22 bp, Artificial Sequence
  Target HLA Sequence complement
tcgacagcgacgccgcgagcca

SEQ ID NO: 16309 - DNA, 22 bp, Artificial Sequence
  Target HLA Sequence complement
cgacagcgacgccgcgagccag

SEQ ID NO: 16310 - DNA, 22 bp, Artificial Sequence
  Target HLA Sequence complement
gacagcgacgccgcgagccaga

SEQ ID NO: 16311 - DNA, 22 bp, Artificial Sequence
  Target HLA Sequence complement
acagcgacgccgcgagccagag

SEQ ID NO: 16312 - DNA, 22 bp, Artificial Sequence
  Target HLA Sequence complement
cagcgacgccgcgagccagagg

SEQ ID NO: 16313 - DNA, 22 bp, Artificial Sequence
  Target HLA Sequence complement
agcgacgccgcgagccagagga

SEQ ID NO: 16314 - DNA, 22 bp, Artificial Sequence
  Target HLA Sequence complement
gcgacgccgcgagccagaggat

SEQ ID NO: 16315 - DNA, 22 bp, Artificial Sequence
  Target HLA Sequence complement
cgacgccgcgagccagaggatg

SEQ ID NO: 16316 - DNA, 22 bp, Artificial Sequence
  Target HLA Sequence complement
gacgccgcgagccagaggatgg

SEQ ID NO: 16317 - DNA, 22 bp, Artificial Sequence
  Target HLA Sequence complement
acgccgcgagccagaggatgga

SEQ ID NO: 16318 - DNA, 22 bp, Artificial Sequence
  Target HLA Sequence complement
cgccgcgagccagaggatggag

SEQ ID NO: 16319 - DNA, 22 bp, Artificial Sequence
  Target HLA Sequence complement
gccgcgagccagaggatggagc

SEQ ID NO: 16320 - DNA, 22 bp, Artificial Sequence
  Target HLA Sequence complement
ccgcgagccagaggatggagcc

SEQ ID NO: 16321 - DNA, 22 bp, Artificial Sequence
  Target HLA Sequence complement
cgcgagccagaggatggagccg

SEQ ID NO: 16322 - DNA, 22 bp, Artificial Sequence
  Target HLA Sequence complement
gcgagccagaggatggagccgc

SEQ ID NO: 16323 - DNA, 22 bp, Artificial Sequence
  Target HLA Sequence complement
cgagccagaggatggagccgcg

SEQ ID NO: 16324 - DNA, 22 bp, Artificial Sequence
  Target HLA Sequence complement
gagccagaggatggagccgcgg

SEQ ID NO: 16325 - DNA, 22 bp, Artificial Sequence
  Target HLA Sequence complement
agccagaggatggagccgcggg

SEQ ID NO: 16326 - DNA, 22 bp, Artificial Sequence
  Target HLA Sequence complement
gccagaggatggagccgcgggc

SEQ ID NO: 16327 - DNA, 22 bp, Artificial Sequence
  Target HLA Sequence complement
ccagaggatggagccgcgggcg

SEQ ID NO: 16328 - DNA, 22 bp, Artificial Sequence
  Target HLA Sequence complement
cagaggatggagccgcgggcgc

SEQ ID NO: 16329 - DNA, 22 bp, Artificial Sequence
  Target HLA Sequence complement
agaggatggagccgcgggcgcc

SEQ ID NO: 16330 - DNA, 22 bp, Artificial Sequence
  Target HLA Sequence complement
gaggatggagccgcgggcgccg

SEQ ID NO: 16331 - DNA, 22 bp, Artificial Sequence
  Target HLA Sequence complement
aggatggagccgcgggcgccgt

SEQ ID NO: 16332 - DNA, 22 bp, Artificial Sequence
  Target HLA Sequence complement
ggatggagccgcgggcgccgtg

SEQ ID NO: 16333 - DNA, 22 bp, Artificial Sequence
  Target HLA Sequence complement
gatggagccgcgggcgccgtgg

SEQ ID NO: 16334 - DNA, 22 bp, Artificial Sequence
  Target HLA Sequence complement
atggagccgcgggcgccgtgga

SEQ ID NO: 16335 - DNA, 22 bp, Artificial Sequence
  Target HLA Sequence complement
tggagccgcgggcgccgtggat

SEQ ID NO: 16336 - DNA, 22 bp, Artificial Sequence
  Target HLA Sequence complement
ggagccgcgggcgccgtggata

SEQ ID NO: 16337 - DNA, 22 bp, Artificial Sequence
  Target HLA Sequence complement
gagccgcgggcgccgtggatag

SEQ ID NO: 16338 - DNA, 22 bp, Artificial Sequence
  Target HLA Sequence complement
agccgcgggcgccgtggataga

SEQ ID NO: 16339 - DNA, 22 bp, Artificial Sequence
  Target HLA Sequence complement
gccgcgggcgccgtggatagag

SEQ ID NO: 16340 - DNA, 22 bp, Artificial Sequence
  Target HLA Sequence complement
ccgcgggcgccgtggatagagc

SEQ ID NO: 16341 - DNA, 22 bp, Artificial Sequence
  Target HLA Sequence complement
cgcgggcgccgtggatagagca

SEQ ID NO: 16342 - DNA, 22 bp, Artificial Sequence
  Target HLA Sequence complement
gcgggcgccgtggatagagcag

SEQ ID NO: 16343 - DNA, 22 bp, Artificial Sequence
  Target HLA Sequence complement
cgggcgccgtggatagagcagg

SEQ ID NO: 16344 - DNA, 22 bp, Artificial Sequence
  Target HLA Sequence complement
gggcgccgtggatagagcagga

SEQ ID NO: 16345 - DNA, 22 bp, Artificial Sequence
  Target HLA Sequence complement
ggcgccgtggatagagcaggag

SEQ ID NO: 16346 - DNA, 22 bp, Artificial Sequence
  Target HLA Sequence complement
gcgccgtggatagagcaggagg

SEQ ID NO: 16347 - DNA, 22 bp, Artificial Sequence
  Target HLA Sequence complement
cgccgtggatagagcaggaggg

SEQ ID NO: 16348 - DNA, 22 bp, Artificial Sequence
  Target HLA Sequence complement
gccgtggatagagcaggagggt

SEQ ID NO: 16349 - DNA, 22 bp, Artificial Sequence
  Target HLA Sequence complement
ccgtggatagagcaggagggtc

SEQ ID NO: 16350 - DNA, 22 bp, Artificial Sequence
  Target HLA Sequence complement
cgtggatagagcaggagggtcc

SEQ ID NO: 16351 - DNA, 22 bp, Artificial Sequence
  Target HLA Sequence complement
gtggatagagcaggagggtccg

SEQ ID NO: 16352 - DNA, 22 bp, Artificial Sequence
  Target HLA Sequence complement
tggatagagcaggagggtccgg

SEQ ID NO: 16353 - DNA, 22 bp, Artificial Sequence
  Target HLA Sequence complement
ggatagagcaggagggtccgga

SEQ ID NO: 16354 - DNA, 22 bp, Artificial Sequence
  Target HLA Sequence complement
gatagagcaggagggtccggag

SEQ ID NO: 16355 - DNA, 22 bp, Artificial Sequence
  Target HLA Sequence complement
gcaggagggtccggagtattgg

SEQ ID NO: 16356 - DNA, 22 bp, Artificial Sequence
  Target HLA Sequence complement
caggagggtccggagtattggg

SEQ ID NO: 16357 - DNA, 22 bp, Artificial Sequence
  Target HLA Sequence complement
ggagggtccggagtattgggac

SEQ ID NO: 16358 - DNA, 22 bp, Artificial Sequence
  Target HLA Sequence complement
gagggtccggagtattgggacg

SEQ ID NO: 16359 - DNA, 22 bp, Artificial Sequence
  Target HLA Sequence complement
agggtccggagtattgggacgg

SEQ ID NO: 16360 - DNA, 22 bp, Artificial Sequence
  Target HLA Sequence complement
gggtccggagtattgggacggg

SEQ ID NO: 16361 - DNA, 22 bp, Artificial Sequence
  Target HLA Sequence complement
ggtccggagtattgggacgggg

SEQ ID NO: 16362 - DNA, 22 bp, Artificial Sequence
  Target HLA Sequence complement
gtccggagtattgggacgggga

SEQ ID NO: 16363 - DNA, 22 bp, Artificial Sequence
  Target HLA Sequence complement
tccggagtattgggacggggag

SEQ ID NO: 16364 - DNA, 22 bp, Artificial Sequence
  Target HLA Sequence complement
ccggagtattgggacggggaga

SEQ ID NO: 16365 - DNA, 22 bp, Artificial Sequence
  Target HLA Sequence complement
cggagtattgggacggggagac

SEQ ID NO: 16366 - DNA, 22 bp, Artificial Sequence
  Target HLA Sequence complement
gtattgggacggggagacacgg

SEQ ID NO: 16367 - DNA, 22 bp, Artificial Sequence
  Target HLA Sequence complement
tgggacggggagacacggaaag

SEQ ID NO: 16368 - DNA, 22 bp, Artificial Sequence
  Target HLA Sequence complement
gggacggggagacacggaaagt

SEQ ID NO: 16369 - DNA, 22 bp, Artificial Sequence
  Target HLA Sequence complement
ggacggggagacacggaaagtg

SEQ ID NO: 16370 - DNA, 22 bp, Artificial Sequence
  Target HLA Sequence complement
aggcccactcacagactcaccg

SEQ ID NO: 16371 - DNA, 22 bp, Artificial Sequence
  Target HLA Sequence complement
ggcccactcacagactcaccga

SEQ ID NO: 16372 - DNA, 22 bp, Artificial Sequence
  Target HLA Sequence complement
gcccactcacagactcaccgag

SEQ ID NO: 16373 - DNA, 22 bp, Artificial Sequence
  Target HLA Sequence complement
cagactcaccgagtggacctgg

SEQ ID NO: 16374 - DNA, 22 bp, Artificial Sequence
  Target HLA Sequence complement
agactcaccgagtggacctggg

SEQ ID NO: 16375 - DNA, 22 bp, Artificial Sequence
  Target HLA Sequence complement
gactcaccgagtggacctgggg

SEQ ID NO: 16376 - DNA, 22 bp, Artificial Sequence
  Target HLA Sequence complement
actcaccgagtggacctgggga

SEQ ID NO: 16377 - DNA, 22 bp, Artificial Sequence
  Target HLA Sequence complement
ctcaccgagtggacctggggac

SEQ ID NO: 16378 - DNA, 22 bp, Artificial Sequence
  Target HLA Sequence complement
tcaccgagtggacctggggacc

SEQ ID NO: 16379 - DNA, 22 bp, Artificial Sequence
  Target HLA Sequence complement
caccgagtggacctggggaccc

SEQ ID NO: 16380 - DNA, 22 bp, Artificial Sequence
  Target HLA Sequence complement
accgagtggacctggggaccct

SEQ ID NO: 16381 - DNA, 22 bp, Artificial Sequence
  Target HLA Sequence complement
ccgagtggacctggggaccctg

SEQ ID NO: 16382 - DNA, 22 bp, Artificial Sequence
  Target HLA Sequence complement
cgagtggacctggggaccctgc

SEQ ID NO: 16383 - DNA, 22 bp, Artificial Sequence
  Target HLA Sequence complement
gagtggacctggggaccctgcg

SEQ ID NO: 16384 - DNA, 22 bp, Artificial Sequence
  Target HLA Sequence complement
agtggacctggggaccctgcgc

SEQ ID NO: 16385 - DNA, 22 bp, Artificial Sequence
  Target HLA Sequence complement
gtggacctggggaccctgcgcg

SEQ ID NO: 16386 - DNA, 22 bp, Artificial Sequence
  Target HLA Sequence complement
tggacctggggaccctgcgcgg

SEQ ID NO: 16387 - DNA, 22 bp, Artificial Sequence
  Target HLA Sequence complement
ggacctggggaccctgcgcggc

SEQ ID NO: 16388 - DNA, 22 bp, Artificial Sequence
  Target HLA Sequence complement
gacctggggaccctgcgcggct

SEQ ID NO: 16389 - DNA, 22 bp, Artificial Sequence
  Target HLA Sequence complement
acctggggaccctgcgcggcta

SEQ ID NO: 16390 - DNA, 22 bp, Artificial Sequence
  Target HLA Sequence complement
cctggggaccctgcgcggctac

SEQ ID NO: 16391 - DNA, 22 bp, Artificial Sequence
  Target HLA Sequence complement
ctggggaccctgcgcggctact

SEQ ID NO: 16392 - DNA, 22 bp, Artificial Sequence
  Target HLA Sequence complement
tggggaccctgcgcggctacta

SEQ ID NO: 16393 - DNA, 22 bp, Artificial Sequence
  Target HLA Sequence complement
ggggaccctgcgcggctactac

SEQ ID NO: 16394 - DNA, 22 bp, Artificial Sequence
  Target HLA Sequence complement
gggaccctgcgcggctactaca

SEQ ID NO: 16395 - DNA, 22 bp, Artificial Sequence
  Target HLA Sequence complement
ggaccctgcgcggctactacaa

SEQ ID NO: 16396 - DNA, 22 bp, Artificial Sequence
  Target HLA Sequence complement
gaccctgcgcggctactacaac

SEQ ID NO: 16397 - DNA, 22 bp, Artificial Sequence
  Target HLA Sequence complement
accctgcgcggctactacaacc

SEQ ID NO: 16398 - DNA, 22 bp, Artificial Sequence
  Target HLA Sequence complement
ccctgcgcggctactacaacca

SEQ ID NO: 16399 - DNA, 22 bp, Artificial Sequence
  Target HLA Sequence complement
cctgcgcggctactacaaccag

SEQ ID NO: 16400 - DNA, 22 bp, Artificial Sequence
  Target HLA Sequence complement
gcgcggctactacaaccagagc

SEQ ID NO: 16401 - DNA, 22 bp, Artificial Sequence
  Target HLA Sequence complement
cgcggctactacaaccagagcg

SEQ ID NO: 16402 - DNA, 22 bp, Artificial Sequence
  Target HLA Sequence complement
actacaaccagagcgaggccgg

SEQ ID NO: 16403 - DNA, 22 bp, Artificial Sequence
  Target HLA Sequence complement
ctacaaccagagcgaggccggt

SEQ ID NO: 16404 - DNA, 22 bp, Artificial Sequence
  Target HLA Sequence complement
acaaccagagcgaggccggttc

SEQ ID NO: 16405 - DNA, 22 bp, Artificial Sequence
  Target HLA Sequence complement
caaccagagcgaggccggttct

SEQ ID NO: 16406 - DNA, 22 bp, Artificial Sequence
  Target HLA Sequence complement
aaccagagcgaggccggttctc

SEQ ID NO: 16407 - DNA, 22 bp, Artificial Sequence
  Target HLA Sequence complement
accagagcgaggccggttctca

SEQ ID NO: 16408 - DNA, 22 bp, Artificial Sequence
  Target HLA Sequence complement
ccagagcgaggccggttctcac

SEQ ID NO: 16409 - DNA, 22 bp, Artificial Sequence
  Target HLA Sequence complement
cagagcgaggccggttctcaca

SEQ ID NO: 16410 - DNA, 22 bp, Artificial Sequence
  Target HLA Sequence complement
agagcgaggccggttctcacac

SEQ ID NO: 16411 - DNA, 22 bp, Artificial Sequence
  Target HLA Sequence complement
gagcgaggccggttctcacacc

SEQ ID NO: 16412 - DNA, 22 bp, Artificial Sequence
  Target HLA Sequence complement
agcgaggccggttctcacaccg

SEQ ID NO: 16413 - DNA, 22 bp, Artificial Sequence
  Target HLA Sequence complement
gcgaggccggttctcacaccgt

SEQ ID NO: 16414 - DNA, 22 bp, Artificial Sequence
  Target HLA Sequence complement
cgaggccggttctcacaccgtc

SEQ ID NO: 16415 - DNA, 22 bp, Artificial Sequence
  Target HLA Sequence complement
gaggccggttctcacaccgtcc

SEQ ID NO: 16416 - DNA, 22 bp, Artificial Sequence
  Target HLA Sequence complement
aggccggttctcacaccgtcca

SEQ ID NO: 16417 - DNA, 22 bp, Artificial Sequence
  Target HLA Sequence complement
ggccggttctcacaccgtccag

SEQ ID NO: 16418 - DNA, 22 bp, Artificial Sequence
  Target HLA Sequence complement
gccggttctcacaccgtccaga

SEQ ID NO: 16419 - DNA, 22 bp, Artificial Sequence
  Target HLA Sequence complement
ccggttctcacaccgtccagag

SEQ ID NO: 16420 - DNA, 22 bp, Artificial Sequence
  Target HLA Sequence complement
cggttctcacaccgtccagagg

SEQ ID NO: 16421 - DNA, 22 bp, Artificial Sequence
  Target HLA Sequence complement
ggatgtatggctgcgacgtggg

SEQ ID NO: 16422 - DNA, 22 bp, Artificial Sequence
  Target HLA Sequence complement
gatgtatggctgcgacgtgggg

SEQ ID NO: 16423 - DNA, 22 bp, Artificial Sequence
  Target HLA Sequence complement
tgtatggctgcgacgtggggtc

SEQ ID NO: 16424 - DNA, 22 bp, Artificial Sequence
  Target HLA Sequence complement
gtatggctgcgacgtggggtcg

SEQ ID NO: 16425 - DNA, 22 bp, Artificial Sequence
  Target HLA Sequence complement
tatggctgcgacgtggggtcgg

SEQ ID NO: 16426 - DNA, 22 bp, Artificial Sequence
  Target HLA Sequence complement
atggctgcgacgtggggtcgga

SEQ ID NO: 16427 - DNA, 22 bp, Artificial Sequence
  Target HLA Sequence complement
tggctgcgacgtggggtcggac

SEQ ID NO: 16428 - DNA, 22 bp, Artificial Sequence
  Target HLA Sequence complement
ggctgcgacgtggggtcggact

SEQ ID NO: 16429 - DNA, 22 bp, Artificial Sequence
  Target HLA Sequence complement
gctgcgacgtggggtcggactg

SEQ ID NO: 16430 - DNA, 22 bp, Artificial Sequence
  Target HLA Sequence complement
ctgcgacgtggggtcggactgg

SEQ ID NO: 16431 - DNA, 22 bp, Artificial Sequence
  Target HLA Sequence complement
tgcgacgtggggtcggactggc

SEQ ID NO: 16432 - DNA, 22 bp, Artificial Sequence
  Target HLA Sequence complement
gcgacgtggggtcggactggcg

SEQ ID NO: 16433 - DNA, 22 bp, Artificial Sequence
  Target HLA Sequence complement
cgacgtggggtcggactggcgc

SEQ ID NO: 16434 - DNA, 22 bp, Artificial Sequence
  Target HLA Sequence complement
gacgtggggtcggactggcgct

SEQ ID NO: 16435 - DNA, 22 bp, Artificial Sequence
  Target HLA Sequence complement
acgtggggtcggactggcgctt

SEQ ID NO: 16436 - DNA, 22 bp, Artificial Sequence
  Target HLA Sequence complement
cgtggggtcggactggcgcttc

SEQ ID NO: 16437 - DNA, 22 bp, Artificial Sequence
  Target HLA Sequence complement
gtggggtcggactggcgcttcc

SEQ ID NO: 16438 - DNA, 22 bp, Artificial Sequence
  Target HLA Sequence complement
tggggtcggactggcgcttcct

SEQ ID NO: 16439 - DNA, 22 bp, Artificial Sequence
  Target HLA Sequence complement
ggggtcggactggcgcttcctc

SEQ ID NO: 16440 - DNA, 22 bp, Artificial Sequence
  Target HLA Sequence complement
gggtcggactggcgcttcctcc

SEQ ID NO: 16441 - DNA, 22 bp, Artificial Sequence
  Target HLA Sequence complement
ggtcggactggcgcttcctccg

SEQ ID NO: 16442 - DNA, 22 bp, Artificial Sequence
  Target HLA Sequence complement
gtcggactggcgcttcctccgc

SEQ ID NO: 16443 - DNA, 22 bp, Artificial Sequence
  Target HLA Sequence complement
tcggactggcgcttcctccgcg

SEQ ID NO: 16444 - DNA, 22 bp, Artificial Sequence
  Target HLA Sequence complement
cggactggcgcttcctccgcgg

SEQ ID NO: 16445 - DNA, 22 bp, Artificial Sequence
  Target HLA Sequence complement
ggactggcgcttcctccgcggg

SEQ ID NO: 16446 - DNA, 22 bp, Artificial Sequence
  Target HLA Sequence complement
gactggcgcttcctccgcgggt

SEQ ID NO: 16447 - DNA, 22 bp, Artificial Sequence
  Target HLA Sequence complement
actggcgcttcctccgcgggta

SEQ ID NO: 16448 - DNA, 22 bp, Artificial Sequence
  Target HLA Sequence complement
ctggcgcttcctccgcgggtac

SEQ ID NO: 16449 - DNA, 22 bp, Artificial Sequence
  Target HLA Sequence complement
tggcgcttcctccgcgggtacc

SEQ ID NO: 16450 - DNA, 22 bp, Artificial Sequence
  Target HLA Sequence complement
ggcgcttcctccgcgggtacca

SEQ ID NO: 16451 - DNA, 22 bp, Artificial Sequence
  Target HLA Sequence complement
gcgcttcctccgcgggtaccac

SEQ ID NO: 16452 - DNA, 22 bp, Artificial Sequence
  Target HLA Sequence complement
cgcttcctccgcgggtaccacc

SEQ ID NO: 16453 - DNA, 22 bp, Artificial Sequence
  Target HLA Sequence complement
gcttcctccgcgggtaccacca

SEQ ID NO: 16454 - DNA, 22 bp, Artificial Sequence
  Target HLA Sequence complement
cttcctccgcgggtaccaccag

SEQ ID NO: 16455 - DNA, 22 bp, Artificial Sequence
  Target HLA Sequence complement
ttcctccgcgggtaccaccagt

SEQ ID NO: 16456 - DNA, 22 bp, Artificial Sequence
  Target HLA Sequence complement
tcctccgcgggtaccaccagta

SEQ ID NO: 16457 - DNA, 22 bp, Artificial Sequence
  Target HLA Sequence complement
cctccgcgggtaccaccagtac

SEQ ID NO: 16458 - DNA, 22 bp, Artificial Sequence
  Target HLA Sequence complement
ctccgcgggtaccaccagtacg

SEQ ID NO: 16459 - DNA, 22 bp, Artificial Sequence
  Target HLA Sequence complement
tccgcgggtaccaccagtacgc

SEQ ID NO: 16460 - DNA, 22 bp, Artificial Sequence
  Target HLA Sequence complement
ccgcgggtaccaccagtacgcc

SEQ ID NO: 16461 - DNA, 22 bp, Artificial Sequence
  Target HLA Sequence complement
cgcgggtaccaccagtacgcct

SEQ ID NO: 16462 - DNA, 22 bp, Artificial Sequence
  Target HLA Sequence complement
gcgggtaccaccagtacgccta

SEQ ID NO: 16463 - DNA, 22 bp, Artificial Sequence
  Target HLA Sequence complement
cgggtaccaccagtacgcctac

SEQ ID NO: 16464 - DNA, 22 bp, Artificial Sequence
  Target HLA Sequence complement
gggtaccaccagtacgcctacg

SEQ ID NO: 16465 - DNA, 22 bp, Artificial Sequence
  Target HLA Sequence complement
accaccagtacgcctacgacgg

SEQ ID NO: 16466 - DNA, 22 bp, Artificial Sequence
  Target HLA Sequence complement
ccaccagtacgcctacgacggc

SEQ ID NO: 16467 - DNA, 22 bp, Artificial Sequence
  Target HLA Sequence complement
caccagtacgcctacgacggca

SEQ ID NO: 16468 - DNA, 22 bp, Artificial Sequence
  Target HLA Sequence complement
ccagtacgcctacgacggcaag

SEQ ID NO: 16469 - DNA, 22 bp, Artificial Sequence
  Target HLA Sequence complement
cagtacgcctacgacggcaagg

SEQ ID NO: 16470 - DNA, 22 bp, Artificial Sequence
  Target HLA Sequence complement
tcgccctgaaagaggacctgcg

SEQ ID NO: 16471 - DNA, 22 bp, Artificial Sequence
  Target HLA Sequence complement
cgccctgaaagaggacctgcgc

SEQ ID NO: 16472 - DNA, 22 bp, Artificial Sequence
  Target HLA Sequence complement
gccctgaaagaggacctgcgct

SEQ ID NO: 16473 - DNA, 22 bp, Artificial Sequence
  Target HLA Sequence complement
ccctgaaagaggacctgcgctc

SEQ ID NO: 16474 - DNA, 22 bp, Artificial Sequence
  Target HLA Sequence complement
agaggacctgcgctcttggacc

SEQ ID NO: 16475 - DNA, 22 bp, Artificial Sequence
  Target HLA Sequence complement
gaggacctgcgctcttggaccg

SEQ ID NO: 16476 - DNA, 22 bp, Artificial Sequence
  Target HLA Sequence complement
aggacctgcgctcttggaccgc

SEQ ID NO: 16477 - DNA, 22 bp, Artificial Sequence
  Target HLA Sequence complement
ggacctgcgctcttggaccgcg

SEQ ID NO: 16478 - DNA, 22 bp, Artificial Sequence
  Target HLA Sequence complement
gacctgcgctcttggaccgcgg

SEQ ID NO: 16479 - DNA, 22 bp, Artificial Sequence
  Target HLA Sequence complement
acctgcgctcttggaccgcggc

SEQ ID NO: 16480 - DNA, 22 bp, Artificial Sequence
  Target HLA Sequence complement
cctgcgctcttggaccgcggcg

SEQ ID NO: 16481 - DNA, 22 bp, Artificial Sequence
  Target HLA Sequence complement
ctgcgctcttggaccgcggcgg

SEQ ID NO: 16482 - DNA, 22 bp, Artificial Sequence
  Target HLA Sequence complement
tgcgctcttggaccgcggcgga

SEQ ID NO: 16483 - DNA, 22 bp, Artificial Sequence
  Target HLA Sequence complement
gcgctcttggaccgcggcggac

SEQ ID NO: 16484 - DNA, 22 bp, Artificial Sequence
  Target HLA Sequence complement
cgctcttggaccgcggcggaca

SEQ ID NO: 16485 - DNA, 22 bp, Artificial Sequence
  Target HLA Sequence complement
gctcttggaccgcggcggacat

SEQ ID NO: 16486 - DNA, 22 bp, Artificial Sequence
  Target HLA Sequence complement
ctcttggaccgcggcggacatg

SEQ ID NO: 16487 - DNA, 22 bp, Artificial Sequence
  Target HLA Sequence complement
tcttggaccgcggcggacatgg

SEQ ID NO: 16488 - DNA, 22 bp, Artificial Sequence
  Target HLA Sequence complement
cttggaccgcggcggacatggc

SEQ ID NO: 16489 - DNA, 22 bp, Artificial Sequence
  Target HLA Sequence complement
ttggaccgcggcggacatggca

SEQ ID NO: 16490 - DNA, 22 bp, Artificial Sequence
  Target HLA Sequence complement
tggaccgcggcggacatggcag

SEQ ID NO: 16491 - DNA, 22 bp, Artificial Sequence
  Target HLA Sequence complement
ggaccgcggcggacatggcagc

SEQ ID NO: 16492 - DNA, 22 bp, Artificial Sequence
  Target HLA Sequence complement
gaccgcggcggacatggcagct

SEQ ID NO: 16493 - DNA, 22 bp, Artificial Sequence
  Target HLA Sequence complement
accgcggcggacatggcagctc

SEQ ID NO: 16494 - DNA, 22 bp, Artificial Sequence
  Target HLA Sequence complement
ccgcggcggacatggcagctca

SEQ ID NO: 16495 - DNA, 22 bp, Artificial Sequence
  Target HLA Sequence complement
cgcggcggacatggcagctcag

SEQ ID NO: 16496 - DNA, 22 bp, Artificial Sequence
  Target HLA Sequence complement
gcggcggacatggcagctcaga

SEQ ID NO: 16497 - DNA, 22 bp, Artificial Sequence
  Target HLA Sequence complement
cggcggacatggcagctcagac

SEQ ID NO: 16498 - DNA, 22 bp, Artificial Sequence
  Target HLA Sequence complement
ggcggacatggcagctcagacc

SEQ ID NO: 16499 - DNA, 22 bp, Artificial Sequence
  Target HLA Sequence complement
gcggacatggcagctcagacca

SEQ ID NO: 16500 - DNA, 22 bp, Artificial Sequence
  Target HLA Sequence complement
cggacatggcagctcagaccac

SEQ ID NO: 16501 - DNA, 22 bp, Artificial Sequence
  Target HLA Sequence complement
ggacatggcagctcagaccacc

SEQ ID NO: 16502 - DNA, 22 bp, Artificial Sequence
  Target HLA Sequence complement
ggcagctcagaccaccaagcac

SEQ ID NO: 16503 - DNA, 22 bp, Artificial Sequence
  Target HLA Sequence complement
ccaccaagcacaagtgggaggc

SEQ ID NO: 16504 - DNA, 22 bp, Artificial Sequence
  Target HLA Sequence complement
caccaagcacaagtgggaggcg

SEQ ID NO: 16505 - DNA, 22 bp, Artificial Sequence
  Target HLA Sequence complement
accaagcacaagtgggaggcgg

SEQ ID NO: 16506 - DNA, 22 bp, Artificial Sequence
  Target HLA Sequence complement
ccaagcacaagtgggaggcggc

SEQ ID NO: 16507 - DNA, 22 bp, Artificial Sequence
  Target HLA Sequence complement
caagcacaagtgggaggcggcc

SEQ ID NO: 16508 - DNA, 22 bp, Artificial Sequence
  Target HLA Sequence complement
aagcacaagtgggaggcggccc

SEQ ID NO: 16509 - DNA, 22 bp, Artificial Sequence
  Target HLA Sequence complement
agcacaagtgggaggcggccca

SEQ ID NO: 16510 - DNA, 22 bp, Artificial Sequence
  Target HLA Sequence complement
gcacaagtgggaggcggcccat

SEQ ID NO: 16511 - DNA, 22 bp, Artificial Sequence
  Target HLA Sequence complement
cacaagtgggaggcggcccatg

SEQ ID NO: 16512 - DNA, 22 bp, Artificial Sequence
  Target HLA Sequence complement
acaagtgggaggcggcccatgt

SEQ ID NO: 16513 - DNA, 22 bp, Artificial Sequence
  Target HLA Sequence complement
caagtgggaggcggcccatgtg

SEQ ID NO: 16514 - DNA, 22 bp, Artificial Sequence
  Target HLA Sequence complement
aagtgggaggcggcccatgtgg

SEQ ID NO: 16515 - DNA, 22 bp, Artificial Sequence
  Target HLA Sequence complement
agtgggaggcggcccatgtggc

SEQ ID NO: 16516 - DNA, 22 bp, Artificial Sequence
  Target HLA Sequence complement
gtgggaggcggcccatgtggcg

SEQ ID NO: 16517 - DNA, 22 bp, Artificial Sequence
  Target HLA Sequence complement
tgggaggcggcccatgtggcgg

SEQ ID NO: 16518 - DNA, 22 bp, Artificial Sequence
  Target HLA Sequence complement
gggaggcggcccatgtggcgga

SEQ ID NO: 16519 - DNA, 22 bp, Artificial Sequence
  Target HLA Sequence complement
ggaggcggcccatgtggcggag

SEQ ID NO: 16520 - DNA, 22 bp, Artificial Sequence
  Target HLA Sequence complement
gaggcggcccatgtggcggagc

SEQ ID NO: 16521 - DNA, 22 bp, Artificial Sequence
  Target HLA Sequence complement
aggcggcccatgtggcggagca

SEQ ID NO: 16522 - DNA, 22 bp, Artificial Sequence
  Target HLA Sequence complement
ggcggcccatgtggcggagcag

SEQ ID NO: 16523 - DNA, 22 bp, Artificial Sequence
  Target HLA Sequence complement
gcggcccatgtggcggagcagt

SEQ ID NO: 16524 - DNA, 22 bp, Artificial Sequence
  Target HLA Sequence complement
cggcccatgtggcggagcagtt

SEQ ID NO: 16525 - DNA, 22 bp, Artificial Sequence
  Target HLA Sequence complement
ggcccatgtggcggagcagttg

SEQ ID NO: 16526 - DNA, 22 bp, Artificial Sequence
  Target HLA Sequence complement
gcccatgtggcggagcagttga

SEQ ID NO: 16527 - DNA, 22 bp, Artificial Sequence
  Target HLA Sequence complement
cccatgtggcggagcagttgag

SEQ ID NO: 16528 - DNA, 22 bp, Artificial Sequence
  Target HLA Sequence complement
tgtggcggagcagttgagagcc

SEQ ID NO: 16529 - DNA, 22 bp, Artificial Sequence
  Target HLA Sequence complement
gtggcggagcagttgagagcct

SEQ ID NO: 16530 - DNA, 22 bp, Artificial Sequence
  Target HLA Sequence complement
ggcggagcagttgagagcctac

SEQ ID NO: 16531 - DNA, 22 bp, Artificial Sequence
  Target HLA Sequence complement
gcggagcagttgagagcctacc

SEQ ID NO: 16532 - DNA, 22 bp, Artificial Sequence
  Target HLA Sequence complement
gttgagagcctacctggagggc

SEQ ID NO: 16533 - DNA, 22 bp, Artificial Sequence
  Target HLA Sequence complement
tgagagcctacctggagggcac

SEQ ID NO: 16534 - DNA, 22 bp, Artificial Sequence
  Target HLA Sequence complement
gagagcctacctggagggcacg

SEQ ID NO: 16535 - DNA, 22 bp, Artificial Sequence
  Target HLA Sequence complement
agagcctacctggagggcacgt

SEQ ID NO: 16536 - DNA, 22 bp, Artificial Sequence
  Target HLA Sequence complement
gagcctacctggagggcacgtg

SEQ ID NO: 16537 - DNA, 22 bp, Artificial Sequence
  Target HLA Sequence complement
agcctacctggagggcacgtgc

SEQ ID NO: 16538 - DNA, 22 bp, Artificial Sequence
  Target HLA Sequence complement
gcctacctggagggcacgtgcg

SEQ ID NO: 16539 - DNA, 22 bp, Artificial Sequence
  Target HLA Sequence complement
cctacctggagggcacgtgcgt

SEQ ID NO: 16540 - DNA, 22 bp, Artificial Sequence
  Target HLA Sequence complement
ctacctggagggcacgtgcgtg

SEQ ID NO: 16541 - DNA, 22 bp, Artificial Sequence
  Target HLA Sequence complement
tacctggagggcacgtgcgtgg

SEQ ID NO: 16542 - DNA, 22 bp, Artificial Sequence
  Target HLA Sequence complement
acctggagggcacgtgcgtgga

SEQ ID NO: 16543 - DNA, 22 bp, Artificial Sequence
  Target HLA Sequence complement
cctggagggcacgtgcgtggag

SEQ ID NO: 16544 - DNA, 22 bp, Artificial Sequence
  Target HLA Sequence complement
ctggagggcacgtgcgtggagt

SEQ ID NO: 16545 - DNA, 22 bp, Artificial Sequence
  Target HLA Sequence complement
tggagggcacgtgcgtggagtg

SEQ ID NO: 16546 - DNA, 22 bp, Artificial Sequence
  Target HLA Sequence complement
ggagggcacgtgcgtggagtgg

SEQ ID NO: 16547 - DNA, 22 bp, Artificial Sequence
  Target HLA Sequence complement
gagggcacgtgcgtggagtggc

SEQ ID NO: 16548 - DNA, 22 bp, Artificial Sequence
  Target HLA Sequence complement
agggcacgtgcgtggagtggct

SEQ ID NO: 16549 - DNA, 22 bp, Artificial Sequence
  Target HLA Sequence complement
gggcacgtgcgtggagtggctc

SEQ ID NO: 16550 - DNA, 22 bp, Artificial Sequence
  Target HLA Sequence complement
ggcacgtgcgtggagtggctcc

SEQ ID NO: 16551 - DNA, 22 bp, Artificial Sequence
  Target HLA Sequence complement
gcacgtgcgtggagtggctccg

SEQ ID NO: 16552 - DNA, 22 bp, Artificial Sequence
  Target HLA Sequence complement
cacgtgcgtggagtggctccgc

SEQ ID NO: 16553 - DNA, 22 bp, Artificial Sequence
  Target HLA Sequence complement
acgtgcgtggagtggctccgca

SEQ ID NO: 16554 - DNA, 22 bp, Artificial Sequence
  Target HLA Sequence complement
cgtgcgtggagtggctccgcag

SEQ ID NO: 16555 - DNA, 22 bp, Artificial Sequence
  Target HLA Sequence complement
gtgcgtggagtggctccgcaga

SEQ ID NO: 16556 - DNA, 22 bp, Artificial Sequence
  Target HLA Sequence complement
tgcgtggagtggctccgcagat

SEQ ID NO: 16557 - DNA, 22 bp, Artificial Sequence
  Target HLA Sequence complement
gcgtggagtggctccgcagata

SEQ ID NO: 16558 - DNA, 22 bp, Artificial Sequence
  Target HLA Sequence complement
cgtggagtggctccgcagatac

SEQ ID NO: 16559 - DNA, 22 bp, Artificial Sequence
  Target HLA Sequence complement
gtggagtggctccgcagatacc

SEQ ID NO: 16560 - DNA, 22 bp, Artificial Sequence
  Target HLA Sequence complement
ggagtggctccgcagatacctg

SEQ ID NO: 16561 - DNA, 22 bp, Artificial Sequence
  Target HLA Sequence complement
gagtggctccgcagatacctgg

SEQ ID NO: 16562 - DNA, 22 bp, Artificial Sequence
  Target HLA Sequence complement
gtggctccgcagatacctggag

SEQ ID NO: 16563 - DNA, 22 bp, Artificial Sequence
  Target HLA Sequence complement
ccgcagatacctggagaacggg

SEQ ID NO: 16564 - DNA, 22 bp, Artificial Sequence
  Target HLA Sequence complement
cctggagaacgggaaggagacg

SEQ ID NO: 16565 - DNA, 22 bp, Artificial Sequence
  Target HLA Sequence complement
ctggagaacgggaaggagacgc

SEQ ID NO: 16566 - DNA, 22 bp, Artificial Sequence
  Target HLA Sequence complement
ggagaacgggaaggagacgctg

SEQ ID NO: 16567 - DNA, 22 bp, Artificial Sequence
  Target HLA Sequence complement
gagaacgggaaggagacgctgc

SEQ ID NO: 16568 - DNA, 22 bp, Artificial Sequence
  Target HLA Sequence complement
gaacgggaaggagacgctgcag

SEQ ID NO: 16569 - DNA, 22 bp, Artificial Sequence
  Target HLA Sequence complement
aacgggaaggagacgctgcagc

SEQ ID NO: 16570 - DNA, 22 bp, Artificial Sequence
  Target HLA Sequence complement
acgggaaggagacgctgcagcg

SEQ ID NO: 16571 - DNA, 22 bp, Artificial Sequence
  Target HLA Sequence complement
cgggaaggagacgctgcagcgc

SEQ ID NO: 16572 - DNA, 22 bp, Artificial Sequence
  Target HLA Sequence complement
gggaaggagacgctgcagcgca

SEQ ID NO: 16573 - DNA, 22 bp, Artificial Sequence
  Target HLA Sequence complement
ggaaggagacgctgcagcgcac

SEQ ID NO: 16574 - DNA, 22 bp, Artificial Sequence
  Target HLA Sequence complement
gaaggagacgctgcagcgcacg

SEQ ID NO: 16575 - DNA, 22 bp, Artificial Sequence
  Target HLA Sequence complement
aaggagacgctgcagcgcacgg

SEQ ID NO: 16576 - DNA, 22 bp, Artificial Sequence
  Target HLA Sequence complement
aggagacgctgcagcgcacgga

SEQ ID NO: 16577 - DNA, 22 bp, Artificial Sequence
  Target HLA Sequence complement
ggagacgctgcagcgcacggac

SEQ ID NO: 16578 - DNA, 22 bp, Artificial Sequence
  Target HLA Sequence complement
gagacgctgcagcgcacggacg

SEQ ID NO: 16579 - DNA, 22 bp, Artificial Sequence
  Target HLA Sequence complement
agacgctgcagcgcacggacgc

SEQ ID NO: 16580 - DNA, 22 bp, Artificial Sequence
  Target HLA Sequence complement
gacgctgcagcgcacggacgcc

SEQ ID NO: 16581 - DNA, 22 bp, Artificial Sequence
  Target HLA Sequence complement
acgctgcagcgcacggacgccc

SEQ ID NO: 16582 - DNA, 22 bp, Artificial Sequence
  Target HLA Sequence complement
cgctgcagcgcacggacgcccc

SEQ ID NO: 16583 - DNA, 22 bp, Artificial Sequence
  Target HLA Sequence complement
gctgcagcgcacggacgccccc

SEQ ID NO: 16584 - DNA, 22 bp, Artificial Sequence
  Target HLA Sequence complement
ctgcagcgcacggacgccccca

SEQ ID NO: 16585 - DNA, 22 bp, Artificial Sequence
  Target HLA Sequence complement
tgcagcgcacggacgcccccaa

SEQ ID NO: 16586 - DNA, 22 bp, Artificial Sequence
  Target HLA Sequence complement
gcagcgcacggacgcccccaaa

SEQ ID NO: 16587 - DNA, 22 bp, Artificial Sequence
  Target HLA Sequence complement
cagcgcacggacgcccccaaaa

SEQ ID NO: 16588 - DNA, 22 bp, Artificial Sequence
  Target HLA Sequence complement
agcgcacggacgcccccaaaac

SEQ ID NO: 16589 - DNA, 22 bp, Artificial Sequence
  Target HLA Sequence complement
gcgcacggacgcccccaaaacg

SEQ ID NO: 16590 - DNA, 22 bp, Artificial Sequence
  Target HLA Sequence complement
cgcacggacgcccccaaaacgc

SEQ ID NO: 16591 - DNA, 22 bp, Artificial Sequence
  Target HLA Sequence complement
gcacggacgcccccaaaacgca

SEQ ID NO: 16592 - DNA, 22 bp, Artificial Sequence
  Target HLA Sequence complement
cacggacgcccccaaaacgcat

SEQ ID NO: 16593 - DNA, 22 bp, Artificial Sequence
  Target HLA Sequence complement
ccatgaagccaccctgaggtgc

SEQ ID NO: 16594 - DNA, 22 bp, Artificial Sequence
  Target HLA Sequence complement
tgaagccaccctgaggtgctgg

SEQ ID NO: 16595 - DNA, 22 bp, Artificial Sequence
  Target HLA Sequence complement
gaagccaccctgaggtgctggg

SEQ ID NO: 16596 - DNA, 22 bp, Artificial Sequence
  Target HLA Sequence complement
aagccaccctgaggtgctgggc

SEQ ID NO: 16597 - DNA, 22 bp, Artificial Sequence
  Target HLA Sequence complement
agccaccctgaggtgctgggcc

SEQ ID NO: 16598 - DNA, 22 bp, Artificial Sequence
  Target HLA Sequence complement
gccaccctgaggtgctgggccc

SEQ ID NO: 16599 - DNA, 22 bp, Artificial Sequence
  Target HLA Sequence complement
ccaccctgaggtgctgggccct

SEQ ID NO: 16600 - DNA, 22 bp, Artificial Sequence
  Target HLA Sequence complement
caccctgaggtgctgggccctg

SEQ ID NO: 16601 - DNA, 22 bp, Artificial Sequence
  Target HLA Sequence complement
accctgaggtgctgggccctga

SEQ ID NO: 16602 - DNA, 22 bp, Artificial Sequence
  Target HLA Sequence complement
ccctgaggtgctgggccctgag

SEQ ID NO: 16603 - DNA, 22 bp, Artificial Sequence
  Target HLA Sequence complement
cctgaggtgctgggccctgagc

SEQ ID NO: 16604 - DNA, 22 bp, Artificial Sequence
  Target HLA Sequence complement
ctgaggtgctgggccctgagct

SEQ ID NO: 16605 - DNA, 22 bp, Artificial Sequence
  Target HLA Sequence complement
tgaggtgctgggccctgagctt

SEQ ID NO: 16606 - DNA, 22 bp, Artificial Sequence
  Target HLA Sequence complement
gaggtgctgggccctgagcttc

SEQ ID NO: 16607 - DNA, 22 bp, Artificial Sequence
  Target HLA Sequence complement
aggtgctgggccctgagcttct

SEQ ID NO: 16608 - DNA, 22 bp, Artificial Sequence
  Target HLA Sequence complement
ggtgctgggccctgagcttcta

SEQ ID NO: 16609 - DNA, 22 bp, Artificial Sequence
  Target HLA Sequence complement
gtgctgggccctgagcttctac

SEQ ID NO: 16610 - DNA, 22 bp, Artificial Sequence
  Target HLA Sequence complement
tgctgggccctgagcttctacc

SEQ ID NO: 16611 - DNA, 22 bp, Artificial Sequence
  Target HLA Sequence complement
gctgggccctgagcttctaccc

SEQ ID NO: 16612 - DNA, 22 bp, Artificial Sequence
  Target HLA Sequence complement
ctgggccctgagcttctaccct

SEQ ID NO: 16613 - DNA, 22 bp, Artificial Sequence
  Target HLA Sequence complement
tgggccctgagcttctaccctg

SEQ ID NO: 16614 - DNA, 22 bp, Artificial Sequence
  Target HLA Sequence complement
gggccctgagcttctaccctgc

SEQ ID NO: 16615 - DNA, 22 bp, Artificial Sequence
  Target HLA Sequence complement
ggccctgagcttctaccctgcg

SEQ ID NO: 16616 - DNA, 22 bp, Artificial Sequence
  Target HLA Sequence complement
gccctgagcttctaccctgcgg

SEQ ID NO: 16617 - DNA, 22 bp, Artificial Sequence
  Target HLA Sequence complement
ccctgagcttctaccctgcgga

SEQ ID NO: 16618 - DNA, 22 bp, Artificial Sequence
  Target HLA Sequence complement
cctgagcttctaccctgcggag

SEQ ID NO: 16619 - DNA, 22 bp, Artificial Sequence
  Target HLA Sequence complement
ccctgcggagatcacactgacc

SEQ ID NO: 16620 - DNA, 22 bp, Artificial Sequence
  Target HLA Sequence complement
gcggagatcacactgacctggc

SEQ ID NO: 16621 - DNA, 22 bp, Artificial Sequence
  Target HLA Sequence complement
gatcacactgacctggcagcgg

SEQ ID NO: 16622 - DNA, 22 bp, Artificial Sequence
  Target HLA Sequence complement
atcacactgacctggcagcggg

SEQ ID NO: 16623 - DNA, 22 bp, Artificial Sequence
  Target HLA Sequence complement
tcacactgacctggcagcggga

SEQ ID NO: 16624 - DNA, 22 bp, Artificial Sequence
  Target HLA Sequence complement
cacactgacctggcagcgggat

SEQ ID NO: 16625 - DNA, 22 bp, Artificial Sequence
  Target HLA Sequence complement
acactgacctggcagcgggatg

SEQ ID NO: 16626 - DNA, 22 bp, Artificial Sequence
  Target HLA Sequence complement
cactgacctggcagcgggatgg

SEQ ID NO: 16627 - DNA, 22 bp, Artificial Sequence
  Target HLA Sequence complement
actgacctggcagcgggatggg

SEQ ID NO: 16628 - DNA, 22 bp, Artificial Sequence
  Target HLA Sequence complement
ctgacctggcagcgggatgggg

SEQ ID NO: 16629 - DNA, 22 bp, Artificial Sequence
  Target HLA Sequence complement
tgacctggcagcgggatgggga

SEQ ID NO: 16630 - DNA, 22 bp, Artificial Sequence
  Target HLA Sequence complement
gacctggcagcgggatggggag

SEQ ID NO: 16631 - DNA, 22 bp, Artificial Sequence
  Target HLA Sequence complement
acctggcagcgggatggggagg

SEQ ID NO: 16632 - DNA, 22 bp, Artificial Sequence
  Target HLA Sequence complement
cctggcagcgggatggggagga

SEQ ID NO: 16633 - DNA, 22 bp, Artificial Sequence
  Target HLA Sequence complement
ctggcagcgggatggggaggac

SEQ ID NO: 16634 - DNA, 22 bp, Artificial Sequence
  Target HLA Sequence complement
tggcagcgggatggggaggacc

SEQ ID NO: 16635 - DNA, 22 bp, Artificial Sequence
  Target HLA Sequence complement
ggcagcgggatggggaggacca

SEQ ID NO: 16636 - DNA, 22 bp, Artificial Sequence
  Target HLA Sequence complement
gcagcgggatggggaggaccag

SEQ ID NO: 16637 - DNA, 22 bp, Artificial Sequence
  Target HLA Sequence complement
cagcgggatggggaggaccaga

SEQ ID NO: 16638 - DNA, 22 bp, Artificial Sequence
  Target HLA Sequence complement
agcgggatggggaggaccagac

SEQ ID NO: 16639 - DNA, 22 bp, Artificial Sequence
  Target HLA Sequence complement
gcgggatggggaggaccagacc

SEQ ID NO: 16640 - DNA, 22 bp, Artificial Sequence
  Target HLA Sequence complement
cgggatggggaggaccagaccc

SEQ ID NO: 16641 - DNA, 22 bp, Artificial Sequence
  Target HLA Sequence complement
gggatggggaggaccagaccca

SEQ ID NO: 16642 - DNA, 22 bp, Artificial Sequence
  Target HLA Sequence complement
ggatggggaggaccagacccag

SEQ ID NO: 16643 - DNA, 22 bp, Artificial Sequence
  Target HLA Sequence complement
gatggggaggaccagacccagg

SEQ ID NO: 16644 - DNA, 22 bp, Artificial Sequence
  Target HLA Sequence complement
atggggaggaccagacccagga

SEQ ID NO: 16645 - DNA, 22 bp, Artificial Sequence
  Target HLA Sequence complement
tggggaggaccagacccaggac

SEQ ID NO: 16646 - DNA, 22 bp, Artificial Sequence
  Target HLA Sequence complement
ggggaggaccagacccaggaca

SEQ ID NO: 16647 - DNA, 22 bp, Artificial Sequence
  Target HLA Sequence complement
gggaggaccagacccaggacac

SEQ ID NO: 16648 - DNA, 22 bp, Artificial Sequence
  Target HLA Sequence complement
ggaggaccagacccaggacacg

SEQ ID NO: 16649 - DNA, 22 bp, Artificial Sequence
  Target HLA Sequence complement
gaggaccagacccaggacacgg

SEQ ID NO: 16650 - DNA, 22 bp, Artificial Sequence
  Target HLA Sequence complement
aggaccagacccaggacacgga

SEQ ID NO: 16651 - DNA, 22 bp, Artificial Sequence
  Target HLA Sequence complement
ggaccagacccaggacacggag

SEQ ID NO: 16652 - DNA, 22 bp, Artificial Sequence
  Target HLA Sequence complement
gaccagacccaggacacggagc

SEQ ID NO: 16653 - DNA, 22 bp, Artificial Sequence
  Target HLA Sequence complement
accagacccaggacacggagct

SEQ ID NO: 16654 - DNA, 22 bp, Artificial Sequence
  Target HLA Sequence complement
ccagacccaggacacggagctc

SEQ ID NO: 16655 - DNA, 22 bp, Artificial Sequence
  Target HLA Sequence complement
cagacccaggacacggagctcg

SEQ ID NO: 16656 - DNA, 22 bp, Artificial Sequence
  Target HLA Sequence complement
agacccaggacacggagctcgt

SEQ ID NO: 16657 - DNA, 22 bp, Artificial Sequence
  Target HLA Sequence complement
gacccaggacacggagctcgtg

SEQ ID NO: 16658 - DNA, 22 bp, Artificial Sequence
  Target HLA Sequence complement
acccaggacacggagctcgtgg

SEQ ID NO: 16659 - DNA, 22 bp, Artificial Sequence
  Target HLA Sequence complement
cccaggacacggagctcgtgga

SEQ ID NO: 16660 - DNA, 22 bp, Artificial Sequence
  Target HLA Sequence complement
ccaggacacggagctcgtggag

SEQ ID NO: 16661 - DNA, 22 bp, Artificial Sequence
  Target HLA Sequence complement
caggacacggagctcgtggaga

SEQ ID NO: 16662 - DNA, 22 bp, Artificial Sequence
  Target HLA Sequence complement
aggacacggagctcgtggagac

SEQ ID NO: 16663 - DNA, 22 bp, Artificial Sequence
  Target HLA Sequence complement
ggacacggagctcgtggagacc

SEQ ID NO: 16664 - DNA, 22 bp, Artificial Sequence
  Target HLA Sequence complement
gacacggagctcgtggagacca

SEQ ID NO: 16665 - DNA, 22 bp, Artificial Sequence
  Target HLA Sequence complement
acacggagctcgtggagaccag

SEQ ID NO: 16666 - DNA, 22 bp, Artificial Sequence
  Target HLA Sequence complement
cacggagctcgtggagaccagg

SEQ ID NO: 16667 - DNA, 22 bp, Artificial Sequence
  Target HLA Sequence complement
acggagctcgtggagaccaggc

SEQ ID NO: 16668 - DNA, 22 bp, Artificial Sequence
  Target HLA Sequence complement
cggagctcgtggagaccaggcc

SEQ ID NO: 16669 - DNA, 22 bp, Artificial Sequence
  Target HLA Sequence complement
ggagctcgtggagaccaggcct

SEQ ID NO: 16670 - DNA, 22 bp, Artificial Sequence
  Target HLA Sequence complement
gagctcgtggagaccaggcctg

SEQ ID NO: 16671 - DNA, 22 bp, Artificial Sequence
  Target HLA Sequence complement
agctcgtggagaccaggcctgc

SEQ ID NO: 16672 - DNA, 22 bp, Artificial Sequence
  Target HLA Sequence complement
gctcgtggagaccaggcctgca

SEQ ID NO: 16673 - DNA, 22 bp, Artificial Sequence
  Target HLA Sequence complement
ctcgtggagaccaggcctgcag

SEQ ID NO: 16674 - DNA, 22 bp, Artificial Sequence
  Target HLA Sequence complement
tcgtggagaccaggcctgcagg

SEQ ID NO: 16675 - DNA, 22 bp, Artificial Sequence
  Target HLA Sequence complement
cgtggagaccaggcctgcaggg

SEQ ID NO: 16676 - DNA, 22 bp, Artificial Sequence
  Target HLA Sequence complement
gtggagaccaggcctgcagggg

SEQ ID NO: 16677 - DNA, 22 bp, Artificial Sequence
  Target HLA Sequence complement
tggagaccaggcctgcagggga

SEQ ID NO: 16678 - DNA, 22 bp, Artificial Sequence
  Target HLA Sequence complement
ggagaccaggcctgcaggggat

SEQ ID NO: 16679 - DNA, 22 bp, Artificial Sequence
  Target HLA Sequence complement
gagaccaggcctgcaggggatg

SEQ ID NO: 16680 - DNA, 22 bp, Artificial Sequence
  Target HLA Sequence complement
agaccaggcctgcaggggatgg

SEQ ID NO: 16681 - DNA, 22 bp, Artificial Sequence
  Target HLA Sequence complement
gaccaggcctgcaggggatgga

SEQ ID NO: 16682 - DNA, 22 bp, Artificial Sequence
  Target HLA Sequence complement
accaggcctgcaggggatggaa

SEQ ID NO: 16683 - DNA, 22 bp, Artificial Sequence
  Target HLA Sequence complement
ccaggcctgcaggggatggaac

SEQ ID NO: 16684 - DNA, 22 bp, Artificial Sequence
  Target HLA Sequence complement
caggcctgcaggggatggaacc

SEQ ID NO: 16685 - DNA, 22 bp, Artificial Sequence
  Target HLA Sequence complement
aggcctgcaggggatggaacct

SEQ ID NO: 16686 - DNA, 22 bp, Artificial Sequence
  Target HLA Sequence complement
ggcctgcaggggatggaacctt

SEQ ID NO: 16687 - DNA, 22 bp, Artificial Sequence
  Target HLA Sequence complement
gcctgcaggggatggaaccttc

SEQ ID NO: 16688 - DNA, 22 bp, Artificial Sequence
  Target HLA Sequence complement
cctgcaggggatggaaccttcc

SEQ ID NO: 16689 - DNA, 22 bp, Artificial Sequence
  Target HLA Sequence complement
ggaaccttccagaagtgggcgg

SEQ ID NO: 16690 - DNA, 22 bp, Artificial Sequence
  Target HLA Sequence complement
gaaccttccagaagtgggcggc

SEQ ID NO: 16691 - DNA, 22 bp, Artificial Sequence
  Target HLA Sequence complement
accttccagaagtgggcggctg

SEQ ID NO: 16692 - DNA, 22 bp, Artificial Sequence
  Target HLA Sequence complement
ccttccagaagtgggcggctgt

SEQ ID NO: 16693 - DNA, 22 bp, Artificial Sequence
  Target HLA Sequence complement
cttccagaagtgggcggctgtg

SEQ ID NO: 16694 - DNA, 22 bp, Artificial Sequence
  Target HLA Sequence complement
ttccagaagtgggcggctgtgg

SEQ ID NO: 16695 - DNA, 22 bp, Artificial Sequence
  Target HLA Sequence complement
tccagaagtgggcggctgtggt

SEQ ID NO: 16696 - DNA, 22 bp, Artificial Sequence
  Target HLA Sequence complement
ccagaagtgggcggctgtggtg

SEQ ID NO: 16697 - DNA, 22 bp, Artificial Sequence
  Target HLA Sequence complement
cagaagtgggcggctgtggtgg

SEQ ID NO: 16698 - DNA, 22 bp, Artificial Sequence
  Target HLA Sequence complement
agaagtgggcggctgtggtggt

SEQ ID NO: 16699 - DNA, 22 bp, Artificial Sequence
  Target HLA Sequence complement
gaagtgggcggctgtggtggtg

SEQ ID NO: 16700 - DNA, 22 bp, Artificial Sequence
  Target HLA Sequence complement
aagtgggcggctgtggtggtgc

SEQ ID NO: 16701 - DNA, 22 bp, Artificial Sequence
  Target HLA Sequence complement
agtgggcggctgtggtggtgcc

SEQ ID NO: 16702 - DNA, 22 bp, Artificial Sequence
  Target HLA Sequence complement
gtgggcggctgtggtggtgcct

SEQ ID NO: 16703 - DNA, 22 bp, Artificial Sequence
  Target HLA Sequence complement
tgggcggctgtggtggtgcctt

SEQ ID NO: 16704 - DNA, 22 bp, Artificial Sequence
  Target HLA Sequence complement
gggcggctgtggtggtgccttc

SEQ ID NO: 16705 - DNA, 22 bp, Artificial Sequence
  Target HLA Sequence complement
ggcggctgtggtggtgccttct

SEQ ID NO: 16706 - DNA, 22 bp, Artificial Sequence
  Target HLA Sequence complement
gcggctgtggtggtgccttctg

SEQ ID NO: 16707 - DNA, 22 bp, Artificial Sequence
  Target HLA Sequence complement
cggctgtggtggtgccttctgg

SEQ ID NO: 16708 - DNA, 22 bp, Artificial Sequence
  Target HLA Sequence complement
ggctgtggtggtgccttctgga

SEQ ID NO: 16709 - DNA, 22 bp, Artificial Sequence
  Target HLA Sequence complement
gctgtggtggtgccttctggac

SEQ ID NO: 16710 - DNA, 22 bp, Artificial Sequence
  Target HLA Sequence complement
gtggtggtgccttctggacagg

SEQ ID NO: 16711 - DNA, 22 bp, Artificial Sequence
  Target HLA Sequence complement
ggtggtgccttctggacaggag

SEQ ID NO: 16712 - DNA, 22 bp, Artificial Sequence
  Target HLA Sequence complement
gtggtgccttctggacaggagc

SEQ ID NO: 16713 - DNA, 22 bp, Artificial Sequence
  Target HLA Sequence complement
ggtgccttctggacaggagcag

SEQ ID NO: 16714 - DNA, 22 bp, Artificial Sequence
  Target HLA Sequence complement
cctgccatgtgcagcatgaggg

SEQ ID NO: 16715 - DNA, 22 bp, Artificial Sequence
  Target HLA Sequence complement
gcatgagggtttgcccaagccc

SEQ ID NO: 16716 - DNA, 22 bp, Artificial Sequence
  Target HLA Sequence complement
catgagggtttgcccaagcccc

SEQ ID NO: 16717 - DNA, 22 bp, Artificial Sequence
  Target HLA Sequence complement
tgagggtttgcccaagcccctc

SEQ ID NO: 16718 - DNA, 22 bp, Artificial Sequence
  Target HLA Sequence complement
gagggtttgcccaagcccctca

SEQ ID NO: 16719 - DNA, 22 bp, Artificial Sequence
  Target HLA Sequence complement
agggtttgcccaagcccctcac

SEQ ID NO: 16720 - DNA, 22 bp, Artificial Sequence
  Target HLA Sequence complement
gggtttgcccaagcccctcacc

SEQ ID NO: 16721 - DNA, 22 bp, Artificial Sequence
  Target HLA Sequence complement
ggtttgcccaagcccctcaccc

SEQ ID NO: 16722 - DNA, 22 bp, Artificial Sequence
  Target HLA Sequence complement
gtttgcccaagcccctcaccct

SEQ ID NO: 16723 - DNA, 22 bp, Artificial Sequence
  Target HLA Sequence complement
tttgcccaagcccctcaccctg

SEQ ID NO: 16724 - DNA, 22 bp, Artificial Sequence
  Target HLA Sequence complement
ttgcccaagcccctcaccctga

SEQ ID NO: 16725 - DNA, 22 bp, Artificial Sequence
  Target HLA Sequence complement
tgcccaagcccctcaccctgag

SEQ ID NO: 16726 - DNA, 22 bp, Artificial Sequence
  Target HLA Sequence complement
gcccaagcccctcaccctgaga

SEQ ID NO: 16727 - DNA, 22 bp, Artificial Sequence
  Target HLA Sequence complement
cccaagcccctcaccctgagat

SEQ ID NO: 16728 - DNA, 22 bp, Artificial Sequence
  Target HLA Sequence complement
ccaagcccctcaccctgagatg

SEQ ID NO: 16729 - DNA, 22 bp, Artificial Sequence
  Target HLA Sequence complement
caagcccctcaccctgagatgg

SEQ ID NO: 16730 - DNA, 22 bp, Artificial Sequence
  Target HLA Sequence complement
aagcccctcaccctgagatggg

SEQ ID NO: 16731 - DNA, 22 bp, Artificial Sequence
  Target HLA Sequence complement
agcccctcaccctgagatggga

SEQ ID NO: 16732 - DNA, 22 bp, Artificial Sequence
  Target HLA Sequence complement
gcccctcaccctgagatgggag

SEQ ID NO: 16733 - DNA, 22 bp, Artificial Sequence
  Target HLA Sequence complement
cccctcaccctgagatgggagc

SEQ ID NO: 16734 - DNA, 22 bp, Artificial Sequence
  Target HLA Sequence complement
ccctcaccctgagatgggagcc

SEQ ID NO: 16735 - DNA, 22 bp, Artificial Sequence
  Target HLA Sequence complement
cctcaccctgagatgggagccg

SEQ ID NO: 16736 - DNA, 22 bp, Artificial Sequence
  Target HLA Sequence complement
ctcaccctgagatgggagccgt

SEQ ID NO: 16737 - DNA, 22 bp, Artificial Sequence
  Target HLA Sequence complement
tcaccctgagatgggagccgtc

SEQ ID NO: 16738 - DNA, 22 bp, Artificial Sequence
  Target HLA Sequence complement
caccctgagatgggagccgtct

SEQ ID NO: 16739 - DNA, 22 bp, Artificial Sequence
  Target HLA Sequence complement
ccctgagatgggagccgtcttc

SEQ ID NO: 16740 - DNA, 22 bp, Artificial Sequence
  Target HLA Sequence complement
cctgagatgggagccgtcttcc

SEQ ID NO: 16741 - DNA, 22 bp, Artificial Sequence
  Target HLA Sequence complement
ctgagatgggagccgtcttccc

SEQ ID NO: 16742 - DNA, 22 bp, Artificial Sequence
  Target HLA Sequence complement
gagatgggagccgtcttcccag

SEQ ID NO: 16743 - DNA, 22 bp, Artificial Sequence
  Target HLA Sequence complement
agatgggagccgtcttcccagc

SEQ ID NO: 16744 - DNA, 22 bp, Artificial Sequence
  Target HLA Sequence complement
gatgggagccgtcttcccagcc

SEQ ID NO: 16745 - DNA, 22 bp, Artificial Sequence
  Target HLA Sequence complement
atgggagccgtcttcccagccc

SEQ ID NO: 16746 - DNA, 22 bp, Artificial Sequence
  Target HLA Sequence complement
tgggagccgtcttcccagccca

SEQ ID NO: 16747 - DNA, 22 bp, Artificial Sequence
  Target HLA Sequence complement
gggagccgtcttcccagcccac

SEQ ID NO: 16748 - DNA, 22 bp, Artificial Sequence
  Target HLA Sequence complement
ggagccgtcttcccagcccacc

SEQ ID NO: 16749 - DNA, 22 bp, Artificial Sequence
  Target HLA Sequence complement
gagccgtcttcccagcccacca

SEQ ID NO: 16750 - DNA, 22 bp, Artificial Sequence
  Target HLA Sequence complement
agccgtcttcccagcccaccat

SEQ ID NO: 16751 - DNA, 22 bp, Artificial Sequence
  Target HLA Sequence complement
gccgtcttcccagcccaccatc

SEQ ID NO: 16752 - DNA, 22 bp, Artificial Sequence
  Target HLA Sequence complement
ccgtcttcccagcccaccatcc

SEQ ID NO: 16753 - DNA, 22 bp, Artificial Sequence
  Target HLA Sequence complement
cgtcttcccagcccaccatccc

SEQ ID NO: 16754 - DNA, 22 bp, Artificial Sequence
  Target HLA Sequence complement
gtcttcccagcccaccatcccc

SEQ ID NO: 16755 - DNA, 22 bp, Artificial Sequence
  Target HLA Sequence complement
tcttcccagcccaccatcccca

SEQ ID NO: 16756 - DNA, 22 bp, Artificial Sequence
  Target HLA Sequence complement
cttcccagcccaccatccccat

SEQ ID NO: 16757 - DNA, 22 bp, Artificial Sequence
  Target HLA Sequence complement
ttcccagcccaccatccccatc

SEQ ID NO: 16758 - DNA, 22 bp, Artificial Sequence
  Target HLA Sequence complement
tcccagcccaccatccccatcg

SEQ ID NO: 16759 - DNA, 22 bp, Artificial Sequence
  Target HLA Sequence complement
cccagcccaccatccccatcgt

SEQ ID NO: 16760 - DNA, 22 bp, Artificial Sequence
  Target HLA Sequence complement
ccagcccaccatccccatcgtg

SEQ ID NO: 16761 - DNA, 22 bp, Artificial Sequence
  Target HLA Sequence complement
cagcccaccatccccatcgtgg

SEQ ID NO: 16762 - DNA, 22 bp, Artificial Sequence
  Target HLA Sequence complement
agcccaccatccccatcgtggg

SEQ ID NO: 16763 - DNA, 22 bp, Artificial Sequence
  Target HLA Sequence complement
gcccaccatccccatcgtgggc

SEQ ID NO: 16764 - DNA, 22 bp, Artificial Sequence
  Target HLA Sequence complement
cccaccatccccatcgtgggca

SEQ ID NO: 16765 - DNA, 22 bp, Artificial Sequence
  Target HLA Sequence complement
ccaccatccccatcgtgggcat

SEQ ID NO: 16766 - DNA, 22 bp, Artificial Sequence
  Target HLA Sequence complement
caccatccccatcgtgggcatc

SEQ ID NO: 16767 - DNA, 22 bp, Artificial Sequence
  Target HLA Sequence complement
cgtgggcatcattgctggcctg

SEQ ID NO: 16768 - DNA, 22 bp, Artificial Sequence
  Target HLA Sequence complement
gtgggcatcattgctggcctgg

SEQ ID NO: 16769 - DNA, 22 bp, Artificial Sequence
  Target HLA Sequence complement
tcactggagctgtggtcgctgc

SEQ ID NO: 16770 - DNA, 22 bp, Artificial Sequence
  Target HLA Sequence complement
cactggagctgtggtcgctgct

SEQ ID NO: 16771 - DNA, 22 bp, Artificial Sequence
  Target HLA Sequence complement
actggagctgtggtcgctgctg

SEQ ID NO: 16772 - DNA, 22 bp, Artificial Sequence
  Target HLA Sequence complement
ctggagctgtggtcgctgctgt

SEQ ID NO: 16773 - DNA, 22 bp, Artificial Sequence
  Target HLA Sequence complement
tggagctgtggtcgctgctgtg

SEQ ID NO: 16774 - DNA, 22 bp, Artificial Sequence
  Target HLA Sequence complement
ggagctgtggtcgctgctgtga

SEQ ID NO: 16775 - DNA, 22 bp, Artificial Sequence
  Target HLA Sequence complement
ggtcgctgctgtgatgtggagg

SEQ ID NO: 16776 - DNA, 22 bp, Artificial Sequence
  Target HLA Sequence complement
cgctgctgtgatgtggaggagg

SEQ ID NO: 16777 - DNA, 22 bp, Artificial Sequence
  Target HLA Sequence complement
ggagggagctactctcaggctg

SEQ ID NO: 16778 - DNA, 22 bp, Artificial Sequence
  Target HLA Sequence complement
gagggagctactctcaggctgc

SEQ ID NO: 16779 - DNA, 22 bp, Artificial Sequence
  Target HLA Sequence complement
ggctgcaagcagtgacagtgcc

SEQ ID NO: 16780 - DNA, 22 bp, Artificial Sequence
  Target HLA Sequence complement
gctgcaagcagtgacagtgccc

SEQ ID NO: 16781 - DNA, 22 bp, Artificial Sequence
  Target HLA Sequence complement
gcaagcagtgacagtgcccagg

SEQ ID NO: 16782 - DNA, 22 bp, Artificial Sequence
  Target HLA Sequence complement
caagcagtgacagtgcccaggg

SEQ ID NO: 16783 - DNA, 22 bp, Artificial Sequence
  Target HLA Sequence complement
aagcagtgacagtgcccagggc

SEQ ID NO: 16784 - DNA, 22 bp, Artificial Sequence
  Target HLA Sequence complement
agcagtgacagtgcccagggct

SEQ ID NO: 16785 - DNA, 22 bp, Artificial Sequence
  Target HLA Sequence complement
gcagtgacagtgcccagggctc

SEQ ID NO: 16786 - DNA, 22 bp, Artificial Sequence
  Target HLA Sequence complement
cagtgacagtgcccagggctct

SEQ ID NO: 16787 - DNA, 22 bp, Artificial Sequence
  Target HLA Sequence complement
agtgacagtgcccagggctctg

SEQ ID NO: 16788 - DNA, 22 bp, Artificial Sequence
  Target HLA Sequence complement
gtgacagtgcccagggctctga

SEQ ID NO: 16789 - DNA, 22 bp, Artificial Sequence
  Target HLA Sequence complement
gacagtgcccagggctctgatg

SEQ ID NO: 16790 - DNA, 22 bp, Artificial Sequence
  Target HLA Sequence complement
cagtgcccagggctctgatgtg

SEQ ID NO: 16791 - DNA, 22 bp, Artificial Sequence
  Target HLA Sequence complement
gtgcccagggctctgatgtgtc

SEQ ID NO: 16792 - DNA, 22 bp, Artificial Sequence
  Target HLA Sequence complement
gcccagggctctgatgtgtctc

SEQ ID NO: 16793 - DNA, 22 bp, Artificial Sequence
  Target HLA Sequence complement
gccttgtgtgggactgagaggc

SEQ ID NO: 16794 - DNA, 22 bp, Artificial Sequence
  Target HLA Sequence complement
tgtgaggaggtggggagaccac

SEQ ID NO: 16795 - DNA, 22 bp, Artificial Sequence
  Target HLA Sequence complement
gtgaggaggtggggagaccacc

SEQ ID NO: 16796 - DNA, 22 bp, Artificial Sequence
  Target HLA Sequence complement
tgaggaggtggggagaccaccc

SEQ ID NO: 16797 - DNA, 22 bp, Artificial Sequence
  Target HLA Sequence complement
gaggaggtggggagaccacccc

SEQ ID NO: 16798 - DNA, 22 bp, Artificial Sequence
  Target HLA Sequence complement
aggaggtggggagaccacccca

SEQ ID NO: 16799 - DNA, 22 bp, Artificial Sequence
  Target HLA Sequence complement
ggaggtggggagaccaccccac

SEQ ID NO: 16800 - DNA, 22 bp, Artificial Sequence
  Target HLA Sequence complement
gaggtggggagaccaccccacc

SEQ ID NO: 16801 - DNA, 22 bp, Artificial Sequence
  Target HLA Sequence complement
aggtggggagaccaccccaccc

SEQ ID NO: 16802 - DNA, 22 bp, Artificial Sequence
  Target HLA Sequence complement
ggtggggagaccaccccacccc

SEQ ID NO: 16803 - DNA, 22 bp, Artificial Sequence
  Target HLA Sequence complement
gtggggagaccaccccaccccc

SEQ ID NO: 16804 - DNA, 22 bp, Artificial Sequence
  Target HLA Sequence complement
tggggagaccaccccaccccca

SEQ ID NO: 16805 - DNA, 22 bp, Artificial Sequence
  Target HLA Sequence complement
ggggagaccaccccacccccat

SEQ ID NO: 16806 - DNA, 22 bp, Artificial Sequence
  Target HLA Sequence complement
gggagaccaccccacccccatg

SEQ ID NO: 16807 - DNA, 22 bp, Artificial Sequence
  Target HLA Sequence complement
ggagaccaccccacccccatgt

SEQ ID NO: 16808 - DNA, 22 bp, Artificial Sequence
  Target HLA Sequence complement
gagaccaccccacccccatgtc

SEQ ID NO: 16809 - DNA, 22 bp, Artificial Sequence
  Target HLA Sequence complement
agaccaccccacccccatgtcc

SEQ ID NO: 16810 - DNA, 22 bp, Artificial Sequence
  Target HLA Sequence complement
gaccaccccacccccatgtcca

SEQ ID NO: 16811 - DNA, 22 bp, Artificial Sequence
  Target HLA Sequence complement
accaccccacccccatgtccac

SEQ ID NO: 16812 - DNA, 22 bp, Artificial Sequence
  Target HLA Sequence complement
ccaccccacccccatgtccacc

SEQ ID NO: 16813 - DNA, 22 bp, Artificial Sequence
  Target HLA Sequence complement
caccccacccccatgtccacca

SEQ ID NO: 16814 - DNA, 22 bp, Artificial Sequence
  Target HLA Sequence complement
accccacccccatgtccaccat

SEQ ID NO: 16815 - DNA, 22 bp, Artificial Sequence
  Target HLA Sequence complement
ccccacccccatgtccaccatg

SEQ ID NO: 16816 - DNA, 22 bp, Artificial Sequence
  Target HLA Sequence complement
cccacccccatgtccaccatga

SEQ ID NO: 16817 - DNA, 22 bp, Artificial Sequence
  Target HLA Sequence complement
ccacccccatgtccaccatgac

SEQ ID NO: 16818 - DNA, 22 bp, Artificial Sequence
  Target HLA Sequence complement
cacccccatgtccaccatgacc

SEQ ID NO: 16819 - DNA, 22 bp, Artificial Sequence
  Target HLA Sequence complement
acccccatgtccaccatgaccc

SEQ ID NO: 16820 - DNA, 22 bp, Artificial Sequence
  Target HLA Sequence complement
cccccatgtccaccatgaccct

SEQ ID NO: 16821 - DNA, 22 bp, Artificial Sequence
  Target HLA Sequence complement
ccccatgtccaccatgaccctc

SEQ ID NO: 16822 - DNA, 22 bp, Artificial Sequence
  Target HLA Sequence complement
ccaccatgaccctcttcccacg

SEQ ID NO: 16823 - DNA, 22 bp, Artificial Sequence
  Target HLA Sequence complement
caccatgaccctcttcccacgc

SEQ ID NO: 16824 - DNA, 22 bp, Artificial Sequence
  Target HLA Sequence complement
ccatgaccctcttcccacgctg

SEQ ID NO: 16825 - DNA, 22 bp, Artificial Sequence
  Target HLA Sequence complement
tgaccctcttcccacgctgacc

SEQ ID NO: 16826 - DNA, 22 bp, Artificial Sequence
  Target HLA Sequence complement
gaccctcttcccacgctgacct

SEQ ID NO: 16827 - DNA, 22 bp, Artificial Sequence
  Target HLA Sequence complement
accctcttcccacgctgacctg

SEQ ID NO: 16828 - DNA, 22 bp, Artificial Sequence
  Target HLA Sequence complement
ccctcttcccacgctgacctgt

SEQ ID NO: 16829 - DNA, 22 bp, Artificial Sequence
  Target HLA Sequence complement
cctcttcccacgctgacctgtg

SEQ ID NO: 16830 - DNA, 22 bp, Artificial Sequence
  Target HLA Sequence complement
ctcttcccacgctgacctgtgc

SEQ ID NO: 16831 - DNA, 22 bp, Artificial Sequence
  Target HLA Sequence complement
cttcccacgctgacctgtgctc

SEQ ID NO: 16832 - DNA, 22 bp, Artificial Sequence
  Target HLA Sequence complement
ttcccacgctgacctgtgctcc

SEQ ID NO: 16833 - DNA, 22 bp, Artificial Sequence
  Target HLA Sequence complement
tcccacgctgacctgtgctccc

SEQ ID NO: 16834 - DNA, 22 bp, Artificial Sequence
  Target HLA Sequence complement
cccacgctgacctgtgctccct

SEQ ID NO: 16835 - DNA, 22 bp, Artificial Sequence
  Target HLA Sequence complement
ccacgctgacctgtgctccctc

SEQ ID NO: 16836 - DNA, 22 bp, Artificial Sequence
  Target HLA Sequence complement
cacgctgacctgtgctccctcc

SEQ ID NO: 16837 - DNA, 22 bp, Artificial Sequence
  Target HLA Sequence complement
acgctgacctgtgctccctccc

SEQ ID NO: 16838 - DNA, 22 bp, Artificial Sequence
  Target HLA Sequence complement
cgctgacctgtgctccctcccc

SEQ ID NO: 16839 - DNA, 22 bp, Artificial Sequence
  Target HLA Sequence complement
gctgacctgtgctccctcccca

SEQ ID NO: 16840 - DNA, 22 bp, Artificial Sequence
  Target HLA Sequence complement
ctgacctgtgctccctccccaa

SEQ ID NO: 16841 - DNA, 22 bp, Artificial Sequence
  Target HLA Sequence complement
gacctgtgctccctccccaatc

SEQ ID NO: 16842 - DNA, 22 bp, Artificial Sequence
  Target HLA Sequence complement
tcctgttccagagaggtggggc

SEQ ID NO: 16843 - DNA, 22 bp, Artificial Sequence
  Target HLA Sequence complement
cctgttccagagaggtggggct

SEQ ID NO: 16844 - DNA, 22 bp, Artificial Sequence
  Target HLA Sequence complement
ctgttccagagaggtggggctg

SEQ ID NO: 16845 - DNA, 22 bp, Artificial Sequence
  Target HLA Sequence complement
gttccagagaggtggggctgag

SEQ ID NO: 16846 - DNA, 22 bp, Artificial Sequence
  Target HLA Sequence complement
ttccagagaggtggggctgagg

SEQ ID NO: 16847 - DNA, 22 bp, Artificial Sequence
  Target HLA Sequence complement
tccagagaggtggggctgaggt

SEQ ID NO: 16848 - DNA, 22 bp, Artificial Sequence
  Target HLA Sequence complement
ccagagaggtggggctgaggtg

SEQ ID NO: 16849 - DNA, 22 bp, Artificial Sequence
  Target HLA Sequence complement
cagagaggtggggctgaggtgt

SEQ ID NO: 16850 - DNA, 22 bp, Artificial Sequence
  Target HLA Sequence complement
agagaggtggggctgaggtgtc

SEQ ID NO: 16851 - DNA, 22 bp, Artificial Sequence
  Target HLA Sequence complement
gagaggtggggctgaggtgtct

SEQ ID NO: 16852 - DNA, 22 bp, Artificial Sequence
  Target HLA Sequence complement
agaggtggggctgaggtgtctc

SEQ ID NO: 16853 - DNA, 22 bp, Artificial Sequence
  Target HLA Sequence complement
gaggtggggctgaggtgtctcc

SEQ ID NO: 16854 - DNA, 22 bp, Artificial Sequence
  Target HLA Sequence complement
aggtggggctgaggtgtctcca

SEQ ID NO: 16855 - DNA, 22 bp, Artificial Sequence
  Target HLA Sequence complement
ggtggggctgaggtgtctccat

SEQ ID NO: 16856 - DNA, 22 bp, Artificial Sequence
  Target HLA Sequence complement
gtggggctgaggtgtctccatc

SEQ ID NO: 16857 - DNA, 22 bp, Artificial Sequence
  Target HLA Sequence complement
ggggctgaggtgtctccatctc

SEQ ID NO: 16858 - DNA, 18 bp, Artificial Sequence
  Target HLA Sequence complement
agaagcagaggggtcagg

SEQ ID NO: 16859 - DNA, 18 bp, Artificial Sequence
  Target HLA Sequence complement
gaagcagaggggtcaggg

SEQ ID NO: 16860 - DNA, 18 bp, Artificial Sequence
  Target HLA Sequence complement
gcggtgtatggattgggg

SEQ ID NO: 16861 - DNA, 18 bp, Artificial Sequence
  Target HLA Sequence complement
tggattggggagtcccag

SEQ ID NO: 16862 - DNA, 18 bp, Artificial Sequence
  Target HLA Sequence complement
ggattggggagtcccagc

SEQ ID NO: 16863 - DNA, 18 bp, Artificial Sequence
  Target HLA Sequence complement
gattggggagtcccagcc

SEQ ID NO: 16864 - DNA, 18 bp, Artificial Sequence
  Target HLA Sequence complement
tggggagtcccagccttg

SEQ ID NO: 16865 - DNA, 18 bp, Artificial Sequence
  Target HLA Sequence complement
ggggagtcccagccttgg

SEQ ID NO: 16866 - DNA, 18 bp, Artificial Sequence
  Target HLA Sequence complement
gggagtcccagccttggg

SEQ ID NO: 16867 - DNA, 18 bp, Artificial Sequence
  Target HLA Sequence complement
ggagtcccagccttgggg

SEQ ID NO: 16868 - DNA, 18 bp, Artificial Sequence
  Target HLA Sequence complement
gagtcccagccttgggga

SEQ ID NO: 16869 - DNA, 18 bp, Artificial Sequence
  Target HLA Sequence complement
agtcccagccttggggat

SEQ ID NO: 16870 - DNA, 18 bp, Artificial Sequence
  Target HLA Sequence complement
gtcccagccttggggatt

SEQ ID NO: 16871 - DNA, 1698 bp, Homo sapiens
cagaagcagaggggtcagggcgaagtcccagggccccaggcgtggctctcagggtctcaggccccgaaggcggtgtatggattggggagtcccagccttggggattccccaactccgcagtttcttttctccctctcccaacctatgtagggtccttcttcctggatactcacgacgcggacccagttctcactcccattgggtgtcgggtttccagagaagccaatcagtgtcgtcgcggtcgcggttctaaagtccgcacgcacccaccgggactcagattctccccagacgccgaggatggccgtcatggcgccccgaaccctcgtcctgctactctcgggggctctggccctgacccagacctgggcgggctctcactccatgaggtatttcttcacatccgtgtcccggcccggccgcggggagccccgcttcatcgcagtgggctacgtggacgacacgcagttcgtgcggttcgacagcgacgccgcgagccagaggatggagccgcgggcgccgtggatagagcaggagggtccggagtattgggacggggagacacggaaagtgaaggcccactcacagactcaccgagtggacctggggaccctgcgcggctactacaaccagagcgaggccggttctcacaccgtccagaggatgtatggctgcgacgtggggtcggactggcgcttcctccgcgggtaccaccagtacgcctacgacggcaaggattacatcgccctgaaagaggacctgcgctcttggaccgcggcggacatggcagctcagaccaccaagcacaagtgggaggcggcccatgtggcggagcagttgagagcctacctggagggcacgtgcgtggagtggctccgcagatacctggagaacgggaaggagacgctgcagcgcacggacgcccccaaaacgcatatgactcaccacgctgtctctgaccatgaagccaccctgaggtgctgggccctgagcttctaccctgcggagatcacactgacctggcagcgggatggggaggaccagacccaggacacggagctcgtggagaccaggcctgcaggggatggaaccttccagaagtgggcggctgtggtggtgccttctggacaggagcagagatacacctgccatgtgcagcatgagggtttgcccaagcccctcaccctgagatgggagccgtcttcccagcccaccatccccatcgtgggcatcattgctggcctggttctctttggagctgtgatcactggagctgtggtcgctgctgtgatgtggaggaggaagagctcagatagaaaaggagggagctactctcaggctgcaagcagtgacagtgcccagggctctgatgtgtctctcacagcttgtaaagtgtgagacagctgccttgtgtgggactgagaggcaagagttgttcctgcccttccctttgtgacttgaagaaccctgactttgtttctgcaaaggcacctgcatgtgtctgtgttcgtgtaggcataatgtgaggaggtggggagaccaccccacccccatgtccaccatgaccctcttcccacgctgacctgtgctccctccccaatcatctttcctgttccagagaggtggggctgaggtgtctccatctctgtctcaacttcatggtgcactgagctgtaacttcttccttccctattaaaa

SEQ ID NO: 16872 - RNA, 4 nt, Artificial Sequence
  Loop Sequence
cgaa

SEQ ID NO: 16873 - RNA, 7 nt, Artificial Sequence
  Loop Sequence
uucaaga

SEQ ID NO: 16874 - RNA, 7 nt, Artificial Sequence
  Loop Sequence
auauuca

SEQ ID NO: 16875 - RNA, 9 nt, Artificial Sequence
  Loop Sequence
ugugcuguc

SEQ ID NO: 16876 - RNA, 6 nt, Artificial Sequence
  Loop Sequence
cucgag

SEQ ID NO: 16877 - RNA, 12 nt, Artificial Sequence
  Loop Sequence
cuuccugucaga

SEQ ID NO: 16878 - RNA, 15 nt, Artificial Sequence
  Loop Sequence
cuucccuuugucaga

SEQ ID NO: 16879 - RNA, 12 nt, Artificial Sequence
  Loop Sequence
guguuauucuug

SEQ ID NO: 16880 - RNA, 12 nt, Artificial Sequence
  Loop Sequence
gugucuuaauug

SEQ ID NO: 16881 - RNA, 12 nt, Artificial Sequence
  Loop Sequence
guguuagucuug

SEQ ID NO: 16882 - RNA, 7 nt, Artificial Sequence
  Loop Sequence
ucaagag

SEQ ID NO: 16883 - RNA, 12 nt, Artificial Sequence
  Loop Sequence
ggacauccaggg

SEQ ID NO: 16884 - RNA, 15 nt, Artificial Sequence
  Loop Sequence
gugaagccacagaug

SEQ ID NO: 16885 - RNA, 23 nt, Artificial Sequence
  5' Flank Sequence
acaccauguugccagucucuagg

SEQ ID NO: 16886 - RNA, 23 nt, Artificial Sequence
  5' Flank Sequence
ugauagcaaugucagcagugccu

SEQ ID NO: 16887 - RNA, 23 nt, Artificial Sequence
  5' Flank Sequence
uauugcuguugacagugagcgac

SEQ ID NO: 16888 - RNA, 21 nt, Artificial Sequence
  3' Flank Sequence
uggcgucuggcccaaccacac

SEQ ID NO: 16889 - RNA, 21 nt, Artificial Sequence
  3' Flank Sequence
guaagguugaccauacucuac

SEQ ID NO: 16890 - DNA, 249 bp, Artificial Sequence
  U6 Promoter
gagggcctatttcccatgattccttcatatttgcatatacgatacaaggctgttagagagataattggaattaatttgactgtaaacacaaagatattagtacaaaatacgtgacgtagaaagtaataatttcttgggtagtttgcagttttaaaattatgttttaaaatggactatcatatgcttaccgtaacttgaaagtatttcgatttcttggctttatatatcttgtggaaaggacgaaacacc

SEQ ID NO: 16891 - DNA, 230 bp, Artificial Sequence
  H1 Promoter
ggaattcgaacgctgacgtcatcaacccgctccaaggaatcgcgggcccagtgtcactaggcgggaacacccagcgcgcgtgcgccctggcaggaagatggctgtgagggacaggggagtggcgccctgcaatatttgcatgtcgctatgtgttctgggaaatcaccataaacgtgaaatgtctttggatttgggaatcttataagttctgtatgagaccactctttccc

SEQ ID NO: 16892 - DNA, 243 bp, Artificial Sequence
  7SK (wt) promoter
ctgcagtatttagcatgccccacccatctgcaaggcattctggatagtgtcaaaacagccggaaatcaagtccgtttatctcaaactttagcattttgggaataaatgatatttgctatgctggttaaattagattttagttaaatttcctgctgaagctctagtacgataagtaacttgacctaagtgtaaagttgagatttccttcaggtttatatagcttgtgcgccgcctgggtacctc

SEQ ID NO: 16893 - DNA, 1335 bp, Artificial Sequence
  Ef1a Promoter
gagtaattcatacaaaaggactcgcccctgccttggggaatcccagggaccgtcgttaaactcccactaacgtagaacccagagatcgctgcgttcccgccccctcacccgcccgctctcgtcatcactgaggtggagaagagcatgcgtgaggctccggtgcccgtcagtgggcagagcgcacatcgcccacagtccccgagaagttggggggaggggtcggcaattgaaccggtgcctagagaaggtggcgcggggtaaactgggaaagtgatgtcgtgtactggctccgcctttttcccgagggtgggggagaaccgtatataagtgcagtagtcgccgtgaacgttctttttcgcaacgggtttgccgccagaacacaggtaagtgccgtgtgtggttcccgcgggcctggcctctttacgggttatggcccttgcgtgccttgaattacttccacgcccctggctgcagtacgtgattcttgatcccgagcttcgggttggaagtgggtgggagagttcgaggccttgcgcttaaggagccccttcgcctcgtgcttgagttgaggcctggcttgggcgctggggccgccgcgtgcgaatctggtggcaccttcgcgcctgtctcgctgctttcgataagtctctagccatttaaaatttttgatgacctgctgcgacgctttttttctggcaagatagtcttgtaaatgcgggccaagatctgcacactggtatttcggtttttggggccgcgggcggcgacggggcccgtgcgtcccagcgcacatgttcggcgaggcggggcctgcgagcgcggccaccgagaatcggacgggggtagtctcaagctggccggcctgctctggtgcctggcctcgcgccgccgtgtatcgccccgccctgggcggcaaggctggcccggtcggcaccagttgcgtgagcggaaagatggccgcttcccggccctgctgcagggagctcaaaatggaggacgcggcgctcgggagagcgggcgggtgagtcacccacacaaaggaaaagggcctttccgtcctcagccgtcgcttcatgtgactccacggagtaccgggcgccgtccaggcacctcgattagttctcgagcttttggagtacgtcgtctttaggttggggggaggggttttatgcgatggagtttccccacactgagtgggtggagactgaagttaggccagcttggcacttgatgtaattctccttggaatttgccctttttgagtttggatcttggttcattctcaagcctcagacagtggttcaaagtttttttcttccatttcaggtgtcgtga

SEQ ID NO: 16894 - RNA, 2 nt, Artificial Sequence
  5' Flank Sequence
gg

SEQ ID NO: 16895 - RNA, 10 nt, Artificial Sequence
  Loop Sequence
gauucuaaaa

SEQ ID NO: 16896 - RNA, 21 nt, Artificial Sequence
  3' Flank Sequence
ugccuacugccucggacuuca

SEQ ID NO: 16897 - DNA, 21 bp, Artificial Sequence
  Target B2M Sequence complement
agagaatggaaagtcaaattt

SEQ ID NO: 16898 - DNA, 21 bp, Artificial Sequence
  Target B2M Sequence complement
atggacatgatcttctttata

SEQ ID NO: 16899 - DNA, 21 bp, Artificial Sequence
  Target B2M Sequence complement
tggacatgatcttctttataa

SEQ ID NO: 16900 - DNA, 21 bp, Artificial Sequence
  Target B2M Sequence complement
ggacatgatcttctttataat

SEQ ID NO: 16901 - DNA, 21 bp, Artificial Sequence
  Target B2M Sequence complement
tgacaggattattggaaattt

SEQ ID NO: 16902 - DNA, 21 bp, Artificial Sequence
  Target B2M Sequence complement
ttgtggttaatctggtttatt

SEQ ID NO: 16903 - DNA, 21 bp, Artificial Sequence
  Target B2M Sequence complement
tgtggttaatctggtttattt

SEQ ID NO: 16904 - DNA, 21 bp, Artificial Sequence
  Target B2M Sequence complement
gcagagaatggaaagtcaaat

SEQ ID NO: 16905 - DNA, 21 bp, Artificial Sequence
  Target B2M Sequence complement
cagagaatggaaagtcaaatt

SEQ ID NO: 16906 - DNA, 21 bp, Artificial Sequence
  Target B2M Sequence complement
gagaatggaaagtcaaatttc

SEQ ID NO: 16907 - DNA, 21 bp, Artificial Sequence
  Target B2M Sequence complement
gtcacagcccaagatagttaa

SEQ ID NO: 16908 - DNA, 21 bp, Artificial Sequence
  Target B2M Sequence complement
tgcttatacacttacacttta

SEQ ID NO: 16909 - DNA, 21 bp, Artificial Sequence
  Target B2M Sequence complement
gcttatacacttacactttat

SEQ ID NO: 16910 - DNA, 21 bp, Artificial Sequence
  Target B2M Sequence complement
cttatacacttacactttatg

SEQ ID NO: 16911 - DNA, 21 bp, Artificial Sequence
  Target B2M Sequence complement
acatggacatgatcttcttta

SEQ ID NO: 16912 - DNA, 21 bp, Artificial Sequence
  Target B2M Sequence complement
catggacatgatcttctttat

SEQ ID NO: 16913 - DNA, 21 bp, Artificial Sequence
  Target B2M Sequence complement
atcaacatcttggtcagattt

SEQ ID NO: 16914 - DNA, 21 bp, Artificial Sequence
  Target B2M Sequence complement
cttgcactcaaagcttgttaa

SEQ ID NO: 16915 - DNA, 21 bp, Artificial Sequence
  Target B2M Sequence complement
agttaagcgtgcataagttaa

SEQ ID NO: 16916 - DNA, 21 bp, Artificial Sequence
  Target B2M Sequence complement
gcataagttaacttccaattt

SEQ ID NO: 16917 - DNA, 21 bp, Artificial Sequence
  Target B2M Sequence complement
tacatactctgcttagaattt

SEQ ID NO: 16918 - DNA, 21 bp, Artificial Sequence
  Target B2M Sequence complement
acatactctgcttagaatttg

SEQ ID NO: 16919 - DNA, 21 bp, Artificial Sequence
  Target B2M Sequence complement
ttgacaggattattggaaatt

SEQ ID NO: 16920 - DNA, 21 bp, Artificial Sequence
  Target B2M Sequence complement
gacaggattattggaaatttg

SEQ ID NO: 16921 - DNA, 21 bp, Artificial Sequence
  Target B2M Sequence complement
taaggcatggttgtggttaat

SEQ ID NO: 16922 - DNA, 21 bp, Artificial Sequence
  Target B2M Sequence complement
gttgtggttaatctggtttat

SEQ ID NO: 16923 - DNA, 21 bp, Artificial Sequence
  Target B2M Sequence complement
gttccacaagttaaataaatc

SEQ ID NO: 16924 - DNA, 21 bp, Artificial Sequence
  Target B2M Sequence complement
tccagcgtactccaaagattc

SEQ ID NO: 16925 - DNA, 21 bp, Artificial Sequence
  Target B2M Sequence complement
tactccaaagattcaggttta

SEQ ID NO: 16926 - DNA, 21 bp, Artificial Sequence
  Target B2M Sequence complement
actccaaagattcaggtttac

SEQ ID NO: 16927 - DNA, 21 bp, Artificial Sequence
  Target B2M Sequence complement
cacgtcatccagcagagaatg

SEQ ID NO: 16928 - DNA, 21 bp, Artificial Sequence
  Target B2M Sequence complement
ggtttcatccatccgacattg

SEQ ID NO: 16929 - DNA, 21 bp, Artificial Sequence
  Target B2M Sequence complement
ccgacattgaagttgacttac

SEQ ID NO: 16930 - DNA, 21 bp, Artificial Sequence
  Target B2M Sequence complement
tgaagaatggagagagaattg

SEQ ID NO: 16931 - DNA, 21 bp, Artificial Sequence
  Target B2M Sequence complement
gagcattcagacttgtctttc

SEQ ID NO: 16932 - DNA, 21 bp, Artificial Sequence
  Target B2M Sequence complement
ttcagcaaggactggtctttc

SEQ ID NO: 16933 - DNA, 21 bp, Artificial Sequence
  Target B2M Sequence complement
gcaaggactggtctttctatc

SEQ ID NO: 16934 - DNA, 21 bp, Artificial Sequence
  Target B2M Sequence complement
cgtgtgaaccatgtgactttg

SEQ ID NO: 16935 - DNA, 21 bp, Artificial Sequence
  Target B2M Sequence complement
ctttgtcacagcccaagatag

SEQ ID NO: 16936 - DNA, 21 bp, Artificial Sequence
  Target B2M Sequence complement
tcacagcccaagatagttaag

SEQ ID NO: 16937 - DNA, 21 bp, Artificial Sequence
  Target B2M Sequence complement
agtgggatcgagacatgtaag

SEQ ID NO: 16938 - DNA, 21 bp, Artificial Sequence
  Target B2M Sequence complement
aggtttgaagatgccgcattt

SEQ ID NO: 16939 - DNA, 21 bp, Artificial Sequence
  Target B2M Sequence complement
ggtttgaagatgccgcatttg

SEQ ID NO: 16940 - DNA, 21 bp, Artificial Sequence
  Target B2M Sequence complement
ttgatatgcttatacacttac

SEQ ID NO: 16941 - DNA, 21 bp, Artificial Sequence
  Target B2M Sequence complement
tgagtgctgtctccatgtttg

SEQ ID NO: 16942 - DNA, 21 bp, Artificial Sequence
  Target B2M Sequence complement
tgtctccatgtttgatgtatc

SEQ ID NO: 16943 - DNA, 21 bp, Artificial Sequence
  Target B2M Sequence complement
tcaacatcttggtcagatttg

SEQ ID NO: 16944 - DNA, 21 bp, Artificial Sequence
  Target B2M Sequence complement
tcagatttgaactcttcaatc

SEQ ID NO: 16945 - DNA, 21 bp, Artificial Sequence
  Target B2M Sequence complement
ttcaatctcttgcactcaaag

SEQ ID NO: 16946 - DNA, 21 bp, Artificial Sequence
  Target B2M Sequence complement
ttgcactcaaagcttgttaag

SEQ ID NO: 16947 - DNA, 21 bp, Artificial Sequence
  Target B2M Sequence complement
actcaaagcttgttaagatag

SEQ ID NO: 16948 - DNA, 21 bp, Artificial Sequence
  Target B2M Sequence complement
agatagttaagcgtgcataag

SEQ ID NO: 16949 - DNA, 21 bp, Artificial Sequence
  Target B2M Sequence complement
tgcataagttaacttccaatt

SEQ ID NO: 16950 - DNA, 21 bp, Artificial Sequence
  Target B2M Sequence complement
gttaacttccaatttacatac

SEQ ID NO: 16951 - DNA, 21 bp, Artificial Sequence
  Target B2M Sequence complement
attgacaggattattggaaat

SEQ ID NO: 16952 - DNA, 21 bp, Artificial Sequence
  Target B2M Sequence complement
gtaaggcatggttgtggttaa

SEQ ID NO: 16953 - DNA, 21 bp, Artificial Sequence
  Target B2M Sequence complement
ggttgtggttaatctggttta

SEQ ID NO: 16954 - DNA, 21 bp, Artificial Sequence
  Target B2M Sequence complement
ttcctgaagctgacagcattc

SEQ ID NO: 16955 - DNA, 21 bp, Artificial Sequence
  Target B2M Sequence complement
gctatccagcgtactccaaag

SEQ ID NO: 16956 - DNA, 21 bp, Artificial Sequence
  Target B2M Sequence complement
catccagcagagaatggaaag

SEQ ID NO: 16957 - DNA, 21 bp, Artificial Sequence
  Target B2M Sequence complement
caaatttcctgaattgctatg

SEQ ID NO: 16958 - DNA, 21 bp, Artificial Sequence
  Target B2M Sequence complement
attgctatgtgtctgggtttc

SEQ ID NO: 16959 - DNA, 21 bp, Artificial Sequence
  Target B2M Sequence complement
gaagatgccgcatttggattg

SEQ ID NO: 16960 - DNA, 21 bp, Artificial Sequence
  Target B2M Sequence complement
caatttacatactctgcttag

SEQ ID NO: 16961 - DNA, 21 bp, Artificial Sequence
  Target B2M Sequence complement
tatccagcgtactccaaagat

SEQ ID NO: 16962 - DNA, 21 bp, Artificial Sequence
  Target B2M Sequence complement
atccagcgtactccaaagatt

SEQ ID NO: 16963 - DNA, 21 bp, Artificial Sequence
  Target B2M Sequence complement
ctccaaagattcaggtttact

SEQ ID NO: 16964 - DNA, 21 bp, Artificial Sequence
  Target B2M Sequence complement
tgctatgtgtctgggtttcat

SEQ ID NO: 16965 - DNA, 21 bp, Artificial Sequence
  Target B2M Sequence complement
tttcatccatccgacattgaa

SEQ ID NO: 16966 - DNA, 21 bp, Artificial Sequence
  Target B2M Sequence complement
gaagttgacttactgaagaat

SEQ ID NO: 16967 - DNA, 21 bp, Artificial Sequence
  Target B2M Sequence complement
gaagaatggagagagaattga

SEQ ID NO: 16968 - DNA, 21 bp, Artificial Sequence
  Target B2M Sequence complement
agaatggagagagaattgaaa

SEQ ID NO: 16969 - DNA, 21 bp, Artificial Sequence
  Target B2M Sequence complement
cagcaaggactggtctttcta

SEQ ID NO: 16970 - DNA, 21 bp, Artificial Sequence
  Target B2M Sequence complement
agcaaggactggtctttctat

SEQ ID NO: 16971 - DNA, 21 bp, Artificial Sequence
  Target B2M Sequence complement
actttgtcacagcccaagata

SEQ ID NO: 16972 - DNA, 21 bp, Artificial Sequence
  Target B2M Sequence complement
ttgtcacagcccaagatagtt

SEQ ID NO: 16973 - DNA, 21 bp, Artificial Sequence
  Target B2M Sequence complement
tgtcacagcccaagatagtta

SEQ ID NO: 16974 - DNA, 21 bp, Artificial Sequence
  Target B2M Sequence complement
cacagcccaagatagttaagt

SEQ ID NO: 16975 - DNA, 21 bp, Artificial Sequence
  Target B2M Sequence complement
gcagcatcatggaggtttgaa

SEQ ID NO: 16976 - DNA, 21 bp, Artificial Sequence
  Target B2M Sequence complement
ccgcatttggattggatgaat

SEQ ID NO: 16977 - DNA, 21 bp, Artificial Sequence
  Target B2M Sequence complement
ttgagtgctgtctccatgttt

SEQ ID NO: 16978 - DNA, 21 bp, Artificial Sequence
  Target B2M Sequence complement
agtgctgtctccatgtttgat

SEQ ID NO: 16979 - DNA, 21 bp, Artificial Sequence
  Target B2M Sequence complement
ctgtctccatgtttgatgtat

SEQ ID NO: 16980 - DNA, 21 bp, Artificial Sequence
  Target B2M Sequence complement
tctaggagggctggcaactta

SEQ ID NO: 16981 - DNA, 21 bp, Artificial Sequence
  Target B2M Sequence complement
caacatcttggtcagatttga

SEQ ID NO: 16982 - DNA, 21 bp, Artificial Sequence
  Target B2M Sequence complement
gtcagatttgaactcttcaat

SEQ ID NO: 16983 - DNA, 21 bp, Artificial Sequence
  Target B2M Sequence complement
tcttgcactcaaagcttgtta

SEQ ID NO: 16984 - DNA, 21 bp, Artificial Sequence
  Target B2M Sequence complement
tgcactcaaagcttgttaaga

SEQ ID NO: 16985 - DNA, 21 bp, Artificial Sequence
  Target B2M Sequence complement
gcactcaaagcttgttaagat

SEQ ID NO: 16986 - DNA, 21 bp, Artificial Sequence
  Target B2M Sequence complement
cactcaaagcttgttaagata

SEQ ID NO: 16987 - DNA, 21 bp, Artificial Sequence
  Target B2M Sequence complement
tcaaagcttgttaagatagtt

SEQ ID NO: 16988 - DNA, 21 bp, Artificial Sequence
  Target B2M Sequence complement
caaagcttgttaagatagtta

SEQ ID NO: 16989 - DNA, 21 bp, Artificial Sequence
  Target B2M Sequence complement
gatagttaagcgtgcataagt

SEQ ID NO: 16990 - DNA, 21 bp, Artificial Sequence
  Target B2M Sequence complement
atagttaagcgtgcataagtt

SEQ ID NO: 16991 - DNA, 21 bp, Artificial Sequence
  Target B2M Sequence complement
tagttaagcgtgcataagtta

SEQ ID NO: 16992 - DNA, 21 bp, Artificial Sequence
  Target B2M Sequence complement
ttaagcgtgcataagttaact

SEQ ID NO: 16993 - DNA, 21 bp, Artificial Sequence
  Target B2M Sequence complement
taagcgtgcataagttaactt

SEQ ID NO: 16994 - DNA, 21 bp, Artificial Sequence
  Target B2M Sequence complement
atttacatactctgcttagaa

SEQ ID NO: 16995 - DNA, 21 bp, Artificial Sequence
  Target B2M Sequence complement
tttacatactctgcttagaat

SEQ ID NO: 16996 - DNA, 21 bp, Artificial Sequence
  Target B2M Sequence complement
acaggattattggaaatttgt

SEQ ID NO: 16997 - DNA, 21 bp, Artificial Sequence
  Target B2M Sequence complement
caggattattggaaatttgtt

SEQ ID NO: 16998 - DNA, 21 bp, Artificial Sequence
  Target B2M Sequence complement
aggcatggttgtggttaatct

SEQ ID NO: 16999 - DNA, 21 bp, Artificial Sequence
  Target B2M Sequence complement
cagcagagaatggaaagtcaa

SEQ ID NO: 17000 - DNA, 21 bp, Artificial Sequence
  Target B2M Sequence complement
tccgacattgaagttgactta

SEQ ID NO: 17001 - DNA, 21 bp, Artificial Sequence
  Target B2M Sequence complement
ctggtctttctatctcttgta

SEQ ID NO: 17002 - DNA, 21 bp, Artificial Sequence
  Target B2M Sequence complement
ccgtgtgaaccatgtgacttt

SEQ ID NO: 17003 - DNA, 21 bp, Artificial Sequence
  Target B2M Sequence complement
cccaagatagttaagtgggat

SEQ ID NO: 17004 - DNA, 21 bp, Artificial Sequence
  Target B2M Sequence complement
ggttgctccacaggtagctct

SEQ ID NO: 17005 - DNA, 21 bp, Artificial Sequence
  Target B2M Sequence complement
gctccacaggtagctctagga

SEQ ID NO: 17006 - DNA, 21 bp, Artificial Sequence
  Target B2M Sequence complement
gggagcagagaattctcttat

SEQ ID NO: 17007 - DNA, 21 bp, Artificial Sequence
  Target B2M Sequence complement
ggagcagagaattctcttatc

SEQ ID NO: 17008 - DNA, 21 bp, Artificial Sequence
  Target B2M Sequence complement
gagcagagaattctcttatcc

SEQ ID NO: 17009 - DNA, 21 bp, Artificial Sequence
  Target B2M Sequence complement
gagaattctcttatccaacat

SEQ ID NO: 17010 - DNA, 21 bp, Artificial Sequence
  Target B2M Sequence complement
gaattctcttatccaacatca

SEQ ID NO: 17011 - DNA, 21 bp, Artificial Sequence
  Target B2M Sequence complement
aagtggagcattcagacttgt

SEQ ID NO: 17012 - DNA, 21 bp, Artificial Sequence
  Target B2M Sequence complement
aaggactggtctttctatctc

SEQ ID NO: 17013 - DNA, 21 bp, Artificial Sequence
  Target B2M Sequence complement
aagcttgttaagatagttaag

SEQ ID NO: 17014 - DNA, 21 bp, Artificial Sequence
  Target B2M Sequence complement
aagcgtgcataagttaacttc

SEQ ID NO: 17015 - DNA, 21 bp, Artificial Sequence
  Target B2M Sequence complement
aagatgccgcatttggattgg

SEQ ID NO: 17016 - DNA, 21 bp, Artificial Sequence
  Target B2M Sequence complement
aagaatggagagagaattgaa

SEQ ID NO: 17017 - DNA, 21 bp, Artificial Sequence
  Target B2M Sequence complement
aacatcaacatcttggtcaga

SEQ ID NO: 17018 - DNA, 21 bp, Artificial Sequence
  Target B2M Sequence complement
aaggcatggttgtggttaatc

SEQ ID NO: 17019 - DNA, 21 bp, Artificial Sequence
  Target B2M Sequence complement
aagcagcatcatggaggtttg

SEQ ID NO: 17020 - DNA, 21 bp, Artificial Sequence
  Target B2M Sequence complement
aagatgagtatgcctgccgtg

SEQ ID NO: 17021 - DNA, 21 bp, Artificial Sequence
  Target B2M Sequence complement
aagttgacttactgaagaatg

SEQ ID NO: 17022 - DNA, 21 bp, Artificial Sequence
  Target B2M Sequence complement
aagatagttaagcgtgcataa

SEQ ID NO: 17023 - DNA, 21 bp, Artificial Sequence
  Target B2M Sequence complement
aacttccaatttacatactct

SEQ ID NO: 17024 - DNA, 21 bp, Artificial Sequence
  Target B2M Sequence complement
aacatcttggtcagatttgaa

SEQ ID NO: 17025 - DNA, 21 bp, Artificial Sequence
  Target B2M Sequence complement
aactcttcaatctcttgcact

SEQ ID NO: 17026 - DNA, 21 bp, Artificial Sequence
  Target B2M Sequence complement
aatttcctgaattgctatgtg

SEQ ID NO: 17027 - DNA, 21 bp, Artificial Sequence
  Target B2M Sequence complement
aatggaaagtcaaatttcctg

SEQ ID NO: 17028 - DNA, 21 bp, Artificial Sequence
  Target B2M Sequence complement
aaccatgtgactttgtcacag

SEQ ID NO: 17029 - DNA, 21 bp, Artificial Sequence
  Target B2M Sequence complement
aattgacaggattattggaaa

SEQ ID NO: 17030 - DNA, 21 bp, Artificial Sequence
  Target B2M Sequence complement
aattctcttatccaacatcaa

SEQ ID NO: 17031 - DNA, 21 bp, Artificial Sequence
  Target B2M Sequence complement
aaagtggagcattcagacttg

SEQ ID NO: 17032 - DNA, 21 bp, Artificial Sequence
  Target B2M Sequence complement
aaagtcaaatttcctgaattg

SEQ ID NO: 17033 - DNA, 21 bp, Artificial Sequence
  Target B2M Sequence complement
gttgctccacaggtagctcta

SEQ ID NO: 17034 - DNA, 21 bp, Artificial Sequence
  Target B2M Sequence complement
aatttacatactctgcttaga

SEQ ID NO: 17035 - DNA, 21 bp, Artificial Sequence
  Target B2M Sequence complement
attcctgaagctgacagcatt

SEQ ID NO: 17036 - DNA, 21 bp, Artificial Sequence
  Target B2M Sequence complement
tgctcgcgctactctctcttt

SEQ ID NO: 17037 - DNA, 21 bp, Artificial Sequence
  Target B2M Sequence complement
ctcgcgctactctctctttct

SEQ ID NO: 17038 - DNA, 21 bp, Artificial Sequence
  Target B2M Sequence complement
tcgcgctactctctctttctg

SEQ ID NO: 17039 - DNA, 21 bp, Artificial Sequence
  Target B2M Sequence complement
ggctatccagcgtactccaaa

SEQ ID NO: 17040 - DNA, 21 bp, Artificial Sequence
  Target B2M Sequence complement
ctatccagcgtactccaaaga

SEQ ID NO: 17041 - DNA, 21 bp, Artificial Sequence
  Target B2M Sequence complement
ccagcgtactccaaagattca

SEQ ID NO: 17042 - DNA, 21 bp, Artificial Sequence
  Target B2M Sequence complement
cagcgtactccaaagattcag

SEQ ID NO: 17043 - DNA, 21 bp, Artificial Sequence
  Target B2M Sequence complement
gtactccaaagattcaggttt

SEQ ID NO: 17044 - DNA, 21 bp, Artificial Sequence
  Target B2M Sequence complement
tccaaagattcaggtttactc

SEQ ID NO: 17045 - DNA, 21 bp, Artificial Sequence
  Target B2M Sequence complement
ctcacgtcatccagcagagaa

SEQ ID NO: 17046 - DNA, 21 bp, Artificial Sequence
  Target B2M Sequence complement
tcacgtcatccagcagagaat

SEQ ID NO: 17047 - DNA, 21 bp, Artificial Sequence
  Target B2M Sequence complement
tcatccagcagagaatggaaa

SEQ ID NO: 17048 - DNA, 21 bp, Artificial Sequence
  Target B2M Sequence complement
atccagcagagaatggaaagt

SEQ ID NO: 17049 - DNA, 21 bp, Artificial Sequence
  Target B2M Sequence complement
tccagcagagaatggaaagtc

SEQ ID NO: 17050 - DNA, 21 bp, Artificial Sequence
  Target B2M Sequence complement
agcagagaatggaaagtcaaa

SEQ ID NO: 17051 - DNA, 21 bp, Artificial Sequence
  Target B2M Sequence complement
tcaaatttcctgaattgctat

SEQ ID NO: 17052 - DNA, 21 bp, Artificial Sequence
  Target B2M Sequence complement
ttgctatgtgtctgggtttca

SEQ ID NO: 17053 - DNA, 21 bp, Artificial Sequence
  Target B2M Sequence complement
gctatgtgtctgggtttcatc

SEQ ID NO: 17054 - DNA, 21 bp, Artificial Sequence
  Target B2M Sequence complement
gggtttcatccatccgacatt

SEQ ID NO: 17055 - DNA, 21 bp, Artificial Sequence
  Target B2M Sequence complement
gtttcatccatccgacattga

SEQ ID NO: 17056 - DNA, 21 bp, Artificial Sequence
  Target B2M Sequence complement
ttcatccatccgacattgaag

SEQ ID NO: 17057 - DNA, 21 bp, Artificial Sequence
  Target B2M Sequence complement
tcatccatccgacattgaagt

SEQ ID NO: 17058 - DNA, 21 bp, Artificial Sequence
  Target B2M Sequence complement
catccatccgacattgaagtt

SEQ ID NO: 17059 - DNA, 21 bp, Artificial Sequence
  Target B2M Sequence complement
atccatccgacattgaagttg

SEQ ID NO: 17060 - DNA, 21 bp, Artificial Sequence
  Target B2M Sequence complement
tccatccgacattgaagttga

SEQ ID NO: 17061 - DNA, 21 bp, Artificial Sequence
  Target B2M Sequence complement
atccgacattgaagttgactt

SEQ ID NO: 17062 - DNA, 21 bp, Artificial Sequence
  Target B2M Sequence complement
cgacattgaagttgacttact

SEQ ID NO: 17063 - DNA, 21 bp, Artificial Sequence
  Target B2M Sequence complement
gacattgaagttgacttactg

SEQ ID NO: 17064 - DNA, 21 bp, Artificial Sequence
  Target B2M Sequence complement
cattgaagttgacttactgaa

SEQ ID NO: 17065 - DNA, 21 bp, Artificial Sequence
  Target B2M Sequence complement
ttgaagttgacttactgaaga

SEQ ID NO: 17066 - DNA, 21 bp, Artificial Sequence
  Target B2M Sequence complement
tgaagttgacttactgaagaa

SEQ ID NO: 17067 - DNA, 21 bp, Artificial Sequence
  Target B2M Sequence complement
tactgaagaatggagagagaa

SEQ ID NO: 17068 - DNA, 21 bp, Artificial Sequence
  Target B2M Sequence complement
actgaagaatggagagagaat

SEQ ID NO: 17069 - DNA, 21 bp, Artificial Sequence
  Target B2M Sequence complement
tggagcattcagacttgtctt

SEQ ID NO: 17070 - DNA, 21 bp, Artificial Sequence
  Target B2M Sequence complement
ggagcattcagacttgtcttt

SEQ ID NO: 17071 - DNA, 21 bp, Artificial Sequence
  Target B2M Sequence complement
agcattcagacttgtctttca

SEQ ID NO: 17072 - DNA, 21 bp, Artificial Sequence
  Target B2M Sequence complement
gcattcagacttgtctttcag

SEQ ID NO: 17073 - DNA, 21 bp, Artificial Sequence
  Target B2M Sequence complement
tttcagcaaggactggtcttt

SEQ ID NO: 17074 - DNA, 21 bp, Artificial Sequence
  Target B2M Sequence complement
tcagcaaggactggtctttct

SEQ ID NO: 17075 - DNA, 21 bp, Artificial Sequence
  Target B2M Sequence complement
caaggactggtctttctatct

SEQ ID NO: 17076 - DNA, 21 bp, Artificial Sequence
  Target B2M Sequence complement
ggactggtctttctatctctt

SEQ ID NO: 17077 - DNA, 21 bp, Artificial Sequence
  Target B2M Sequence complement
actggtctttctatctcttgt

SEQ ID NO: 17078 - DNA, 21 bp, Artificial Sequence
  Target B2M Sequence complement
tggtctttctatctcttgtac

SEQ ID NO: 17079 - DNA, 21 bp, Artificial Sequence
  Target B2M Sequence complement
ggtctttctatctcttgtact

SEQ ID NO: 17080 - DNA, 21 bp, Artificial Sequence
  Target B2M Sequence complement
gtctttctatctcttgtacta

SEQ ID NO: 17081 - DNA, 21 bp, Artificial Sequence
  Target B2M Sequence complement
tctttctatctcttgtactac

SEQ ID NO: 17082 - DNA, 21 bp, Artificial Sequence
  Target B2M Sequence complement
ctttctatctcttgtactaca

SEQ ID NO: 17083 - DNA, 21 bp, Artificial Sequence
  Target B2M Sequence complement
tatctcttgtactacactgaa

SEQ ID NO: 17084 - DNA, 21 bp, Artificial Sequence
  Target B2M Sequence complement
atctcttgtactacactgaat

SEQ ID NO: 17085 - DNA, 21 bp, Artificial Sequence
  Target B2M Sequence complement
tgagtatgcctgccgtgtgaa

SEQ ID NO: 17086 - DNA, 21 bp, Artificial Sequence
  Target B2M Sequence complement
gccgtgtgaaccatgtgactt

SEQ ID NO: 17087 - DNA, 21 bp, Artificial Sequence
  Target B2M Sequence complement
gtgtgaaccatgtgactttgt

SEQ ID NO: 17088 - DNA, 21 bp, Artificial Sequence
  Target B2M Sequence complement
tgtgaaccatgtgactttgtc

SEQ ID NO: 17089 - DNA, 21 bp, Artificial Sequence
  Target B2M Sequence complement
gactttgtcacagcccaagat

SEQ ID NO: 17090 - DNA, 21 bp, Artificial Sequence
  Target B2M Sequence complement
tttgtcacagcccaagatagt

SEQ ID NO: 17091 - DNA, 21 bp, Artificial Sequence
  Target B2M Sequence complement
acagcccaagatagttaagtg

SEQ ID NO: 17092 - DNA, 21 bp, Artificial Sequence
  Target B2M Sequence complement
agttaagtgggatcgagacat

SEQ ID NO: 17093 - DNA, 21 bp, Artificial Sequence
  Target B2M Sequence complement
ttaagtgggatcgagacatgt

SEQ ID NO: 17094 - DNA, 21 bp, Artificial Sequence
  Target B2M Sequence complement
taagtgggatcgagacatgta

SEQ ID NO: 17095 - DNA, 21 bp, Artificial Sequence
  Target B2M Sequence complement
gagacatgtaagcagcatcat

SEQ ID NO: 17096 - DNA, 21 bp, Artificial Sequence
  Target B2M Sequence complement
agacatgtaagcagcatcatg

SEQ ID NO: 17097 - DNA, 21 bp, Artificial Sequence
  Target B2M Sequence complement
taagcagcatcatggaggttt

SEQ ID NO: 17098 - DNA, 21 bp, Artificial Sequence
  Target B2M Sequence complement
agcagcatcatggaggtttga

SEQ ID NO: 17099 - DNA, 21 bp, Artificial Sequence
  Target B2M Sequence complement
cagcatcatggaggtttgaag

SEQ ID NO: 17100 - DNA, 21 bp, Artificial Sequence
  Target B2M Sequence complement
agcatcatggaggtttgaaga

SEQ ID NO: 17101 - DNA, 21 bp, Artificial Sequence
  Target B2M Sequence complement
gcatcatggaggtttgaagat

SEQ ID NO: 17102 - DNA, 21 bp, Artificial Sequence
  Target B2M Sequence complement
catcatggaggtttgaagatg

SEQ ID NO: 17103 - DNA, 21 bp, Artificial Sequence
  Target B2M Sequence complement
gtttgaagatgccgcatttgg

SEQ ID NO: 17104 - DNA, 21 bp, Artificial Sequence
  Target B2M Sequence complement
tgaagatgccgcatttggatt

SEQ ID NO: 17105 - DNA, 21 bp, Artificial Sequence
  Target B2M Sequence complement
gccgcatttggattggatgaa

SEQ ID NO: 17106 - DNA, 21 bp, Artificial Sequence
  Target B2M Sequence complement
caaattctgcttgcttgcttt

SEQ ID NO: 17107 - DNA, 21 bp, Artificial Sequence
  Target B2M Sequence complement
tgatatgcttatacacttaca

SEQ ID NO: 17108 - DNA, 21 bp, Artificial Sequence
  Target B2M Sequence complement
gatatgcttatacacttacac

SEQ ID NO: 17109 - DNA, 21 bp, Artificial Sequence
  Target B2M Sequence complement
tatgcttatacacttacactt

SEQ ID NO: 17110 - DNA, 21 bp, Artificial Sequence
  Target B2M Sequence complement
atgcttatacacttacacttt

SEQ ID NO: 17111 - DNA, 21 bp, Artificial Sequence
  Target B2M Sequence complement
ttatacacttacactttatgc

SEQ ID NO: 17112 - DNA, 21 bp, Artificial Sequence
  Target B2M Sequence complement
cacttacactttatgcacaaa

SEQ ID NO: 17113 - DNA, 21 bp, Artificial Sequence
  Target B2M Sequence complement
ataatgttaacatggacatga

SEQ ID NO: 17114 - DNA, 21 bp, Artificial Sequence
  Target B2M Sequence complement
taatgttaacatggacatgat

SEQ ID NO: 17115 - DNA, 21 bp, Artificial Sequence
  Target B2M Sequence complement
atgttaacatggacatgatct

SEQ ID NO: 17116 - DNA, 21 bp, Artificial Sequence
  Target B2M Sequence complement
tgttaacatggacatgatctt

SEQ ID NO: 17117 - DNA, 21 bp, Artificial Sequence
  Target B2M Sequence complement
gttaacatggacatgatcttc

SEQ ID NO: 17118 - DNA, 21 bp, Artificial Sequence
  Target B2M Sequence complement
ttaacatggacatgatcttct

SEQ ID NO: 17119 - DNA, 21 bp, Artificial Sequence
  Target B2M Sequence complement
taacatggacatgatcttctt

SEQ ID NO: 17120 - DNA, 21 bp, Artificial Sequence
  Target B2M Sequence complement
tttgagtgctgtctccatgtt

SEQ ID NO: 17121 - DNA, 21 bp, Artificial Sequence
  Target B2M Sequence complement
gagtgctgtctccatgtttga

SEQ ID NO: 17122 - DNA, 21 bp, Artificial Sequence
  Target B2M Sequence complement
gtgctgtctccatgtttgatg

SEQ ID NO: 17123 - DNA, 21 bp, Artificial Sequence
  Target B2M Sequence complement
tgctgtctccatgtttgatgt

SEQ ID NO: 17124 - DNA, 21 bp, Artificial Sequence
  Target B2M Sequence complement
gctgtctccatgtttgatgta

SEQ ID NO: 17125 - DNA, 21 bp, Artificial Sequence
  Target B2M Sequence complement
gtctccatgtttgatgtatct

SEQ ID NO: 17126 - DNA, 21 bp, Artificial Sequence
  Target B2M Sequence complement
tctccatgtttgatgtatctg

SEQ ID NO: 17127 - DNA, 21 bp, Artificial Sequence
  Target B2M Sequence complement
taggagggctggcaacttaga

SEQ ID NO: 17128 - DNA, 21 bp, Artificial Sequence
  Target B2M Sequence complement
attctcttatccaacatcaac

SEQ ID NO: 17129 - DNA, 21 bp, Artificial Sequence
  Target B2M Sequence complement
ttctcttatccaacatcaaca

SEQ ID NO: 17130 - DNA, 21 bp, Artificial Sequence
  Target B2M Sequence complement
tctcttatccaacatcaacat

SEQ ID NO: 17131 - DNA, 21 bp, Artificial Sequence
  Target B2M Sequence complement
ctcttatccaacatcaacatc

SEQ ID NO: 17132 - DNA, 21 bp, Artificial Sequence
  Target B2M Sequence complement
tcttatccaacatcaacatct

SEQ ID NO: 17133 - DNA, 21 bp, Artificial Sequence
  Target B2M Sequence complement
cttatccaacatcaacatctt

SEQ ID NO: 17134 - DNA, 21 bp, Artificial Sequence
  Target B2M Sequence complement
ttatccaacatcaacatcttg

SEQ ID NO: 17135 - DNA, 21 bp, Artificial Sequence
  Target B2M Sequence complement
acatcaacatcttggtcagat

SEQ ID NO: 17136 - DNA, 21 bp, Artificial Sequence
  Target B2M Sequence complement
catcaacatcttggtcagatt

SEQ ID NO: 17137 - DNA, 21 bp, Artificial Sequence
  Target B2M Sequence complement
acatcttggtcagatttgaac

SEQ ID NO: 17138 - DNA, 21 bp, Artificial Sequence
  Target B2M Sequence complement
catcttggtcagatttgaact

SEQ ID NO: 17139 - DNA, 21 bp, Artificial Sequence
  Target B2M Sequence complement
cttggtcagatttgaactctt

SEQ ID NO: 17140 - DNA, 21 bp, Artificial Sequence
  Target B2M Sequence complement
tggtcagatttgaactcttca

SEQ ID NO: 17141 - DNA, 21 bp, Artificial Sequence
  Target B2M Sequence complement
ggtcagatttgaactcttcaa

SEQ ID NO: 17142 - DNA, 21 bp, Artificial Sequence
  Target B2M Sequence complement
atttgaactcttcaatctctt

SEQ ID NO: 17143 - DNA, 21 bp, Artificial Sequence
  Target B2M Sequence complement
tcttcaatctcttgcactcaa

SEQ ID NO: 17144 - DNA, 21 bp, Artificial Sequence
  Target B2M Sequence complement
cttcaatctcttgcactcaaa

SEQ ID NO: 17145 - DNA, 21 bp, Artificial Sequence
  Target B2M Sequence complement
ctcttgcactcaaagcttgtt

SEQ ID NO: 17146 - DNA, 21 bp, Artificial Sequence
  Target B2M Sequence complement
ctcaaagcttgttaagatagt

SEQ ID NO: 17147 - DNA, 21 bp, Artificial Sequence
  Target B2M Sequence complement
agcttgttaagatagttaagc

SEQ ID NO: 17148 - DNA, 21 bp, Artificial Sequence
  Target B2M Sequence complement
taagatagttaagcgtgcata

SEQ ID NO: 17149 - DNA, 21 bp, Artificial Sequence
  Target B2M Sequence complement
gtgcataagttaacttccaat

SEQ ID NO: 17150 - DNA, 21 bp, Artificial Sequence
  Target B2M Sequence complement
taacttccaatttacatactc

SEQ ID NO: 17151 - DNA, 21 bp, Artificial Sequence
  Target B2M Sequence complement
ccaatttacatactctgctta

SEQ ID NO: 17152 - DNA, 21 bp, Artificial Sequence
  Target B2M Sequence complement
catactctgcttagaatttgg

SEQ ID NO: 17153 - DNA, 21 bp, Artificial Sequence
  Target B2M Sequence complement
agtaaggcatggttgtggtta

SEQ ID NO: 17154 - DNA, 21 bp, Artificial Sequence
  Target B2M Sequence complement
ggcatggttgtggttaatctg

SEQ ID NO: 17155 - DNA, 21 bp, Artificial Sequence
  Target B2M Sequence complement
tggttgtggttaatctggttt

SEQ ID NO: 17156 - DNA, 21 bp, Artificial Sequence
  Target B2M Sequence complement
tcctgaagctgacagcattcg

SEQ ID NO: 17157 - DNA, 21 bp, Artificial Sequence
  Target B2M Sequence complement
tctttctggcctggaggctat

SEQ ID NO: 17158 - DNA, 21 bp, Artificial Sequence
  Target B2M Sequence complement
caaagattcaggtttactcac

SEQ ID NO: 17159 - DNA, 21 bp, Artificial Sequence
  Target B2M Sequence complement
attcaggtttactcacgtcat

SEQ ID NO: 17160 - DNA, 21 bp, Artificial Sequence
  Target B2M Sequence complement
ttcaggtttactcacgtcatc

SEQ ID NO: 17161 - DNA, 21 bp, Artificial Sequence
  Target B2M Sequence complement
tcaggtttactcacgtcatcc

SEQ ID NO: 17162 - DNA, 21 bp, Artificial Sequence
  Target B2M Sequence complement
acgtcatccagcagagaatgg

SEQ ID NO: 17163 - DNA, 21 bp, Artificial Sequence
  Target B2M Sequence complement
tttcctgaattgctatgtgtc

SEQ ID NO: 17164 - DNA, 21 bp, Artificial Sequence
  Target B2M Sequence complement
tcctgaattgctatgtgtctg

SEQ ID NO: 17165 - DNA, 21 bp, Artificial Sequence
  Target B2M Sequence complement
ctatgtgtctgggtttcatcc

SEQ ID NO: 17166 - DNA, 21 bp, Artificial Sequence
  Target B2M Sequence complement
tgtgtctgggtttcatccatc

SEQ ID NO: 17167 - DNA, 21 bp, Artificial Sequence
  Target B2M Sequence complement
tgggtttcatccatccgacat

SEQ ID NO: 17168 - DNA, 21 bp, Artificial Sequence
  Target B2M Sequence complement
ccatccgacattgaagttgac

SEQ ID NO: 17169 - DNA, 21 bp, Artificial Sequence
  Target B2M Sequence complement
attgaagttgacttactgaag

SEQ ID NO: 17170 - DNA, 21 bp, Artificial Sequence
  Target B2M Sequence complement
agttgacttactgaagaatgg

SEQ ID NO: 17171 - DNA, 21 bp, Artificial Sequence
  Target B2M Sequence complement
cttactgaagaatggagagag

SEQ ID NO: 17172 - DNA, 21 bp, Artificial Sequence
  Target B2M Sequence complement
agtggagcattcagacttgtc

SEQ ID NO: 17173 - DNA, 21 bp, Artificial Sequence
  Target B2M Sequence complement
tcagacttgtctttcagcaag

SEQ ID NO: 17174 - DNA, 21 bp, Artificial Sequence
  Target B2M Sequence complement
ctttcagcaaggactggtctt

SEQ ID NO: 17175 - DNA, 21 bp, Artificial Sequence
  Target B2M Sequence complement
gactggtctttctatctcttg

SEQ ID NO: 17176 - DNA, 21 bp, Artificial Sequence
  Target B2M Sequence complement
tttctatctcttgtactacac

SEQ ID NO: 17177 - DNA, 21 bp, Artificial Sequence
  Target B2M Sequence complement
tctatctcttgtactacactg

SEQ ID NO: 17178 - DNA, 21 bp, Artificial Sequence
  Target B2M Sequence complement
tgaaccatgtgactttgtcac

SEQ ID NO: 17179 - DNA, 21 bp, Artificial Sequence
  Target B2M Sequence complement
cctgaagctgacagcattcgg

SEQ ID NO: 17180 - DNA, 21 bp, Artificial Sequence
  Target B2M Sequence complement
ctgaagctgacagcattcggg

SEQ ID NO: 17181 - DNA, 21 bp, Artificial Sequence
  Target B2M Sequence complement
tgaagctgacagcattcgggc

SEQ ID NO: 17182 - DNA, 21 bp, Artificial Sequence
  Target B2M Sequence complement
atgtctcgctccgtggcctta

SEQ ID NO: 17183 - DNA, 21 bp, Artificial Sequence
  Target B2M Sequence complement
cttagctgtgctcgcgctact

SEQ ID NO: 17184 - DNA, 21 bp, Artificial Sequence
  Target B2M Sequence complement
ttagctgtgctcgcgctactc

SEQ ID NO: 17185 - DNA, 21 bp, Artificial Sequence
  Target B2M Sequence complement
tagctgtgctcgcgctactct

SEQ ID NO: 17186 - DNA, 21 bp, Artificial Sequence
  Target B2M Sequence complement
tgtgctcgcgctactctctct

SEQ ID NO: 17187 - DNA, 21 bp, Artificial Sequence
  Target B2M Sequence complement
gtgctcgcgctactctctctt

SEQ ID NO: 17188 - DNA, 21 bp, Artificial Sequence
  Target B2M Sequence complement
gctcgcgctactctctctttc

SEQ ID NO: 17189 - DNA, 21 bp, Artificial Sequence
  Target B2M Sequence complement
cgcgctactctctctttctgg

SEQ ID NO: 17190 - DNA, 21 bp, Artificial Sequence
  Target B2M Sequence complement
gcgctactctctctttctggc

SEQ ID NO: 17191 - DNA, 21 bp, Artificial Sequence
  Target B2M Sequence complement
cgctactctctctttctggcc

SEQ ID NO: 17192 - DNA, 21 bp, Artificial Sequence
  Target B2M Sequence complement
gctactctctctttctggcct

SEQ ID NO: 17193 - DNA, 21 bp, Artificial Sequence
  Target B2M Sequence complement
ctactctctctttctggcctg

SEQ ID NO: 17194 - DNA, 21 bp, Artificial Sequence
  Target B2M Sequence complement
tactctctctttctggcctgg

SEQ ID NO: 17195 - DNA, 21 bp, Artificial Sequence
  Target B2M Sequence complement
actctctctttctggcctgga

SEQ ID NO: 17196 - DNA, 21 bp, Artificial Sequence
  Target B2M Sequence complement
ctctctctttctggcctggag

SEQ ID NO: 17197 - DNA, 21 bp, Artificial Sequence
  Target B2M Sequence complement
tctctctttctggcctggagg

SEQ ID NO: 17198 - DNA, 21 bp, Artificial Sequence
  Target B2M Sequence complement
tctctttctggcctggaggct

SEQ ID NO: 17199 - DNA, 21 bp, Artificial Sequence
  Target B2M Sequence complement
ctctttctggcctggaggcta

SEQ ID NO: 17200 - DNA, 21 bp, Artificial Sequence
  Target B2M Sequence complement
ctttctggcctggaggctatc

SEQ ID NO: 17201 - DNA, 21 bp, Artificial Sequence
  Target B2M Sequence complement
tttctggcctggaggctatcc

SEQ ID NO: 17202 - DNA, 21 bp, Artificial Sequence
  Target B2M Sequence complement
ttctggcctggaggctatcca

SEQ ID NO: 17203 - DNA, 21 bp, Artificial Sequence
  Target B2M Sequence complement
ctggaggctatccagcgtact

SEQ ID NO: 17204 - DNA, 21 bp, Artificial Sequence
  Target B2M Sequence complement
tggaggctatccagcgtactc

SEQ ID NO: 17205 - DNA, 21 bp, Artificial Sequence
  Target B2M Sequence complement
gaggctatccagcgtactcca

SEQ ID NO: 17206 - DNA, 21 bp, Artificial Sequence
  Target B2M Sequence complement
aggctatccagcgtactccaa

SEQ ID NO: 17207 - DNA, 21 bp, Artificial Sequence
  Target B2M Sequence complement
agcgtactccaaagattcagg

SEQ ID NO: 17208 - DNA, 21 bp, Artificial Sequence
  Target B2M Sequence complement
gcgtactccaaagattcaggt

SEQ ID NO: 17209 - DNA, 21 bp, Artificial Sequence
  Target B2M Sequence complement
cgtactccaaagattcaggtt

SEQ ID NO: 17210 - DNA, 21 bp, Artificial Sequence
  Target B2M Sequence complement
ccaaagattcaggtttactca

SEQ ID NO: 17211 - DNA, 21 bp, Artificial Sequence
  Target B2M Sequence complement
aaagattcaggtttactcacg

SEQ ID NO: 17212 - DNA, 21 bp, Artificial Sequence
  Target B2M Sequence complement
aagattcaggtttactcacgt

SEQ ID NO: 17213 - DNA, 21 bp, Artificial Sequence
  Target B2M Sequence complement
agattcaggtttactcacgtc

SEQ ID NO: 17214 - DNA, 21 bp, Artificial Sequence
  Target B2M Sequence complement
gattcaggtttactcacgtca

SEQ ID NO: 17215 - DNA, 21 bp, Artificial Sequence
  Target B2M Sequence complement
caggtttactcacgtcatcca

SEQ ID NO: 17216 - DNA, 21 bp, Artificial Sequence
  Target B2M Sequence complement
aggtttactcacgtcatccag

SEQ ID NO: 17217 - DNA, 21 bp, Artificial Sequence
  Target B2M Sequence complement
ggtttactcacgtcatccagc

SEQ ID NO: 17218 - DNA, 21 bp, Artificial Sequence
  Target B2M Sequence complement
gtttactcacgtcatccagca

SEQ ID NO: 17219 - DNA, 21 bp, Artificial Sequence
  Target B2M Sequence complement
tttactcacgtcatccagcag

SEQ ID NO: 17220 - DNA, 21 bp, Artificial Sequence
  Target B2M Sequence complement
ttactcacgtcatccagcaga

SEQ ID NO: 17221 - DNA, 21 bp, Artificial Sequence
  Target B2M Sequence complement
tactcacgtcatccagcagag

SEQ ID NO: 17222 - DNA, 21 bp, Artificial Sequence
  Target B2M Sequence complement
actcacgtcatccagcagaga

SEQ ID NO: 17223 - DNA, 21 bp, Artificial Sequence
  Target B2M Sequence complement
cgtcatccagcagagaatgga

SEQ ID NO: 17224 - DNA, 21 bp, Artificial Sequence
  Target B2M Sequence complement
gtcatccagcagagaatggaa

SEQ ID NO: 17225 - DNA, 21 bp, Artificial Sequence
  Target B2M Sequence complement
ccagcagagaatggaaagtca

SEQ ID NO: 17226 - DNA, 21 bp, Artificial Sequence
  Target B2M Sequence complement
agaatggaaagtcaaatttcc

SEQ ID NO: 17227 - DNA, 21 bp, Artificial Sequence
  Target B2M Sequence complement
gaatggaaagtcaaatttcct

SEQ ID NO: 17228 - DNA, 21 bp, Artificial Sequence
  Target B2M Sequence complement
atggaaagtcaaatttcctga

SEQ ID NO: 17229 - DNA, 21 bp, Artificial Sequence
  Target B2M Sequence complement
tggaaagtcaaatttcctgaa

SEQ ID NO: 17230 - DNA, 21 bp, Artificial Sequence
  Target B2M Sequence complement
ggaaagtcaaatttcctgaat

SEQ ID NO: 17231 - DNA, 21 bp, Artificial Sequence
  Target B2M Sequence complement
gaaagtcaaatttcctgaatt

SEQ ID NO: 17232 - DNA, 21 bp, Artificial Sequence
  Target B2M Sequence complement
aagtcaaatttcctgaattgc

SEQ ID NO: 17233 - DNA, 21 bp, Artificial Sequence
  Target B2M Sequence complement
agtcaaatttcctgaattgct

SEQ ID NO: 17234 - DNA, 21 bp, Artificial Sequence
  Target B2M Sequence complement
gtcaaatttcctgaattgcta

SEQ ID NO: 17235 - DNA, 21 bp, Artificial Sequence
  Target B2M Sequence complement
aaatttcctgaattgctatgt

SEQ ID NO: 17236 - DNA, 21 bp, Artificial Sequence
  Target B2M Sequence complement
atttcctgaattgctatgtgt

SEQ ID NO: 17237 - DNA, 21 bp, Artificial Sequence
  Target B2M Sequence complement
ttcctgaattgctatgtgtct

SEQ ID NO: 17238 - DNA, 21 bp, Artificial Sequence
  Target B2M Sequence complement
cctgaattgctatgtgtctgg

SEQ ID NO: 17239 - DNA, 21 bp, Artificial Sequence
  Target B2M Sequence complement
ctgaattgctatgtgtctggg

SEQ ID NO: 17240 - DNA, 21 bp, Artificial Sequence
  Target B2M Sequence complement
tgaattgctatgtgtctgggt

SEQ ID NO: 17241 - DNA, 21 bp, Artificial Sequence
  Target B2M Sequence complement
gaattgctatgtgtctgggtt

SEQ ID NO: 17242 - DNA, 21 bp, Artificial Sequence
  Target B2M Sequence complement
aattgctatgtgtctgggttt

SEQ ID NO: 17243 - DNA, 21 bp, Artificial Sequence
  Target B2M Sequence complement
tatgtgtctgggtttcatcca

SEQ ID NO: 17244 - DNA, 21 bp, Artificial Sequence
  Target B2M Sequence complement
atgtgtctgggtttcatccat

SEQ ID NO: 17245 - DNA, 21 bp, Artificial Sequence
  Target B2M Sequence complement
gtgtctgggtttcatccatcc

SEQ ID NO: 17246 - DNA, 21 bp, Artificial Sequence
  Target B2M Sequence complement
tgtctgggtttcatccatccg

SEQ ID NO: 17247 - DNA, 21 bp, Artificial Sequence
  Target B2M Sequence complement
gtctgggtttcatccatccga

SEQ ID NO: 17248 - DNA, 21 bp, Artificial Sequence
  Target B2M Sequence complement
tctgggtttcatccatccgac

SEQ ID NO: 17249 - DNA, 21 bp, Artificial Sequence
  Target B2M Sequence complement
ctgggtttcatccatccgaca

SEQ ID NO: 17250 - DNA, 21 bp, Artificial Sequence
  Target B2M Sequence complement
catccgacattgaagttgact

SEQ ID NO: 17251 - DNA, 21 bp, Artificial Sequence
  Target B2M Sequence complement
acattgaagttgacttactga

SEQ ID NO: 17252 - DNA, 21 bp, Artificial Sequence
  Target B2M Sequence complement
gttgacttactgaagaatgga

SEQ ID NO: 17253 - DNA, 21 bp, Artificial Sequence
  Target B2M Sequence complement
ttgacttactgaagaatggag

SEQ ID NO: 17254 - DNA, 21 bp, Artificial Sequence
  Target B2M Sequence complement
tgacttactgaagaatggaga

SEQ ID NO: 17255 - DNA, 21 bp, Artificial Sequence
  Target B2M Sequence complement
gacttactgaagaatggagag

SEQ ID NO: 17256 - DNA, 21 bp, Artificial Sequence
  Target B2M Sequence complement
acttactgaagaatggagaga

SEQ ID NO: 17257 - DNA, 21 bp, Artificial Sequence
  Target B2M Sequence complement
ttactgaagaatggagagaga

SEQ ID NO: 17258 - DNA, 21 bp, Artificial Sequence
  Target B2M Sequence complement
ctgaagaatggagagagaatt

SEQ ID NO: 17259 - DNA, 21 bp, Artificial Sequence
  Target B2M Sequence complement
gtggagcattcagacttgtct

SEQ ID NO: 17260 - DNA, 21 bp, Artificial Sequence
  Target B2M Sequence complement
cattcagacttgtctttcagc

SEQ ID NO: 17261 - DNA, 21 bp, Artificial Sequence
  Target B2M Sequence complement
attcagacttgtctttcagca

SEQ ID NO: 17262 - DNA, 21 bp, Artificial Sequence
  Target B2M Sequence complement
ttcagacttgtctttcagcaa

SEQ ID NO: 17263 - DNA, 21 bp, Artificial Sequence
  Target B2M Sequence complement
cagacttgtctttcagcaagg

SEQ ID NO: 17264 - DNA, 21 bp, Artificial Sequence
  Target B2M Sequence complement
agacttgtctttcagcaagga

SEQ ID NO: 17265 - DNA, 21 bp, Artificial Sequence
  Target B2M Sequence complement
gacttgtctttcagcaaggac

SEQ ID NO: 17266 - DNA, 21 bp, Artificial Sequence
  Target B2M Sequence complement
acttgtctttcagcaaggact

SEQ ID NO: 17267 - DNA, 21 bp, Artificial Sequence
  Target B2M Sequence complement
cttgtctttcagcaaggactg

SEQ ID NO: 17268 - DNA, 21 bp, Artificial Sequence
  Target B2M Sequence complement
ttgtctttcagcaaggactgg

SEQ ID NO: 17269 - DNA, 21 bp, Artificial Sequence
  Target B2M Sequence complement
tgtctttcagcaaggactggt

SEQ ID NO: 17270 - DNA, 21 bp, Artificial Sequence
  Target B2M Sequence complement
gtctttcagcaaggactggtc

SEQ ID NO: 17271 - DNA, 21 bp, Artificial Sequence
  Target B2M Sequence complement
tctttcagcaaggactggtct

SEQ ID NO: 17272 - DNA, 21 bp, Artificial Sequence
  Target B2M Sequence complement
aggactggtctttctatctct

SEQ ID NO: 17273 - DNA, 21 bp, Artificial Sequence
  Target B2M Sequence complement
ttctatctcttgtactacact

SEQ ID NO: 17274 - DNA, 21 bp, Artificial Sequence
  Target B2M Sequence complement
ctatctcttgtactacactga

SEQ ID NO: 17275 - DNA, 21 bp, Artificial Sequence
  Target B2M Sequence complement
tctcttgtactacactgaatt

SEQ ID NO: 17276 - DNA, 21 bp, Artificial Sequence
  Target B2M Sequence complement
ctcttgtactacactgaattc

SEQ ID NO: 17277 - DNA, 21 bp, Artificial Sequence
  Target B2M Sequence complement
tcttgtactacactgaattca

SEQ ID NO: 17278 - DNA, 21 bp, Artificial Sequence
  Target B2M Sequence complement
cttgtactacactgaattcac

SEQ ID NO: 17279 - DNA, 21 bp, Artificial Sequence
  Target B2M Sequence complement
ttgtactacactgaattcacc

SEQ ID NO: 17280 - DNA, 21 bp, Artificial Sequence
  Target B2M Sequence complement
tgtactacactgaattcaccc

SEQ ID NO: 17281 - DNA, 21 bp, Artificial Sequence
  Target B2M Sequence complement
aaagatgagtatgcctgccgt

SEQ ID NO: 17282 - DNA, 21 bp, Artificial Sequence
  Target B2M Sequence complement
agatgagtatgcctgccgtgt

SEQ ID NO: 17283 - DNA, 21 bp, Artificial Sequence
  Target B2M Sequence complement
gatgagtatgcctgccgtgtg

SEQ ID NO: 17284 - DNA, 21 bp, Artificial Sequence
  Target B2M Sequence complement
atgagtatgcctgccgtgtga

SEQ ID NO: 17285 - DNA, 21 bp, Artificial Sequence
  Target B2M Sequence complement
gagtatgcctgccgtgtgaac

SEQ ID NO: 17286 - DNA, 21 bp, Artificial Sequence
  Target B2M Sequence complement
agtatgcctgccgtgtgaacc

SEQ ID NO: 17287 - DNA, 21 bp, Artificial Sequence
  Target B2M Sequence complement
gtatgcctgccgtgtgaacca

SEQ ID NO: 17288 - DNA, 21 bp, Artificial Sequence
  Target B2M Sequence complement
tatgcctgccgtgtgaaccat

SEQ ID NO: 17289 - DNA, 21 bp, Artificial Sequence
  Target B2M Sequence complement
atgcctgccgtgtgaaccatg

SEQ ID NO: 17290 - DNA, 21 bp, Artificial Sequence
  Target B2M Sequence complement
tgcctgccgtgtgaaccatgt

SEQ ID NO: 17291 - DNA, 21 bp, Artificial Sequence
  Target B2M Sequence complement
cctgccgtgtgaaccatgtga

SEQ ID NO: 17292 - DNA, 21 bp, Artificial Sequence
  Target B2M Sequence complement
ctgccgtgtgaaccatgtgac

SEQ ID NO: 17293 - DNA, 21 bp, Artificial Sequence
  Target B2M Sequence complement
tgccgtgtgaaccatgtgact

SEQ ID NO: 17294 - DNA, 21 bp, Artificial Sequence
  Target B2M Sequence complement
gtgaaccatgtgactttgtca

SEQ ID NO: 17295 - DNA, 21 bp, Artificial Sequence
  Target B2M Sequence complement
gaaccatgtgactttgtcaca

SEQ ID NO: 17296 - DNA, 21 bp, Artificial Sequence
  Target B2M Sequence complement
accatgtgactttgtcacagc

SEQ ID NO: 17297 - DNA, 21 bp, Artificial Sequence
  Target B2M Sequence complement
ccatgtgactttgtcacagcc

SEQ ID NO: 17298 - DNA, 21 bp, Artificial Sequence
  Target B2M Sequence complement
catgtgactttgtcacagccc

SEQ ID NO: 17299 - DNA, 21 bp, Artificial Sequence
  Target B2M Sequence complement
atgtgactttgtcacagccca

SEQ ID NO: 17300 - DNA, 21 bp, Artificial Sequence
  Target B2M Sequence complement
tgtgactttgtcacagcccaa

SEQ ID NO: 17301 - DNA, 21 bp, Artificial Sequence
  Target B2M Sequence complement
gtgactttgtcacagcccaag

SEQ ID NO: 17302 - DNA, 21 bp, Artificial Sequence
  Target B2M Sequence complement
tgactttgtcacagcccaaga

SEQ ID NO: 17303 - DNA, 21 bp, Artificial Sequence
  Target B2M Sequence complement
cagcccaagatagttaagtgg

SEQ ID NO: 17304 - DNA, 21 bp, Artificial Sequence
  Target B2M Sequence complement
agcccaagatagttaagtggg

SEQ ID NO: 17305 - DNA, 21 bp, Artificial Sequence
  Target B2M Sequence complement
gcccaagatagttaagtggga

SEQ ID NO: 17306 - DNA, 21 bp, Artificial Sequence
  Target B2M Sequence complement
ccaagatagttaagtgggatc

SEQ ID NO: 17307 - DNA, 21 bp, Artificial Sequence
  Target B2M Sequence complement
caagatagttaagtgggatcg

SEQ ID NO: 17308 - DNA, 21 bp, Artificial Sequence
  Target B2M Sequence complement
aagatagttaagtgggatcga

SEQ ID NO: 17309 - DNA, 21 bp, Artificial Sequence
  Target B2M Sequence complement
agatagttaagtgggatcgag

SEQ ID NO: 17310 - DNA, 21 bp, Artificial Sequence
  Target B2M Sequence complement
gatagttaagtgggatcgaga

SEQ ID NO: 17311 - DNA, 21 bp, Artificial Sequence
  Target B2M Sequence complement
atagttaagtgggatcgagac

SEQ ID NO: 17312 - DNA, 21 bp, Artificial Sequence
  Target B2M Sequence complement
tagttaagtgggatcgagaca

SEQ ID NO: 17313 - DNA, 21 bp, Artificial Sequence
  Target B2M Sequence complement
gttaagtgggatcgagacatg

SEQ ID NO: 17314 - DNA, 21 bp, Artificial Sequence
  Target B2M Sequence complement
aagtgggatcgagacatgtaa

SEQ ID NO: 17315 - DNA, 21 bp, Artificial Sequence
  Target B2M Sequence complement
gtgggatcgagacatgtaagc

SEQ ID NO: 17316 - DNA, 21 bp, Artificial Sequence
  Target B2M Sequence complement
tgggatcgagacatgtaagca

SEQ ID NO: 17317 - DNA, 21 bp, Artificial Sequence
  Target B2M Sequence complement
gggatcgagacatgtaagcag

SEQ ID NO: 17318 - DNA, 21 bp, Artificial Sequence
  Target B2M Sequence complement
ggatcgagacatgtaagcagc

SEQ ID NO: 17319 - DNA, 21 bp, Artificial Sequence
  Target B2M Sequence complement
gatcgagacatgtaagcagca

SEQ ID NO: 17320 - DNA, 21 bp, Artificial Sequence
  Target B2M Sequence complement
atcgagacatgtaagcagcat

SEQ ID NO: 17321 - DNA, 21 bp, Artificial Sequence
  Target B2M Sequence complement
tcgagacatgtaagcagcatc

SEQ ID NO: 17322 - DNA, 21 bp, Artificial Sequence
  Target B2M Sequence complement
cgagacatgtaagcagcatca

SEQ ID NO: 17323 - DNA, 21 bp, Artificial Sequence
  Target B2M Sequence complement
gacatgtaagcagcatcatgg

SEQ ID NO: 17324 - DNA, 21 bp, Artificial Sequence
  Target B2M Sequence complement
acatgtaagcagcatcatgga

SEQ ID NO: 17325 - DNA, 21 bp, Artificial Sequence
  Target B2M Sequence complement
catgtaagcagcatcatggag

SEQ ID NO: 17326 - DNA, 21 bp, Artificial Sequence
  Target B2M Sequence complement
atgtaagcagcatcatggagg

SEQ ID NO: 17327 - DNA, 21 bp, Artificial Sequence
  Target B2M Sequence complement
tgtaagcagcatcatggaggt

SEQ ID NO: 17328 - DNA, 21 bp, Artificial Sequence
  Target B2M Sequence complement
gtaagcagcatcatggaggtt

SEQ ID NO: 17329 - DNA, 21 bp, Artificial Sequence
  Target B2M Sequence complement
atcatggaggtttgaagatgc

SEQ ID NO: 17330 - DNA, 21 bp, Artificial Sequence
  Target B2M Sequence complement
tcatggaggtttgaagatgcc

SEQ ID NO: 17331 - DNA, 21 bp, Artificial Sequence
  Target B2M Sequence complement
catggaggtttgaagatgccg

SEQ ID NO: 17332 - DNA, 21 bp, Artificial Sequence
  Target B2M Sequence complement
atggaggtttgaagatgccgc

SEQ ID NO: 17333 - DNA, 21 bp, Artificial Sequence
  Target B2M Sequence complement
tggaggtttgaagatgccgca

SEQ ID NO: 17334 - DNA, 21 bp, Artificial Sequence
  Target B2M Sequence complement
ggaggtttgaagatgccgcat

SEQ ID NO: 17335 - DNA, 21 bp, Artificial Sequence
  Target B2M Sequence complement
gaggtttgaagatgccgcatt

SEQ ID NO: 17336 - DNA, 21 bp, Artificial Sequence
  Target B2M Sequence complement
tttgaagatgccgcatttgga

SEQ ID NO: 17337 - DNA, 21 bp, Artificial Sequence
  Target B2M Sequence complement
ttgaagatgccgcatttggat

SEQ ID NO: 17338 - DNA, 21 bp, Artificial Sequence
  Target B2M Sequence complement
agatgccgcatttggattgga

SEQ ID NO: 17339 - DNA, 21 bp, Artificial Sequence
  Target B2M Sequence complement
gatgccgcatttggattggat

SEQ ID NO: 17340 - DNA, 21 bp, Artificial Sequence
  Target B2M Sequence complement
atgccgcatttggattggatg

SEQ ID NO: 17341 - DNA, 21 bp, Artificial Sequence
  Target B2M Sequence complement
tgccgcatttggattggatga

SEQ ID NO: 17342 - DNA, 21 bp, Artificial Sequence
  Target B2M Sequence complement
cgcatttggattggatgaatt

SEQ ID NO: 17343 - DNA, 21 bp, Artificial Sequence
  Target B2M Sequence complement
gcatttggattggatgaattc

SEQ ID NO: 17344 - DNA, 21 bp, Artificial Sequence
  Target B2M Sequence complement
catttggattggatgaattcc

SEQ ID NO: 17345 - DNA, 21 bp, Artificial Sequence
  Target B2M Sequence complement
atttggattggatgaattcca

SEQ ID NO: 17346 - DNA, 21 bp, Artificial Sequence
  Target B2M Sequence complement
tttggattggatgaattccaa

SEQ ID NO: 17347 - DNA, 21 bp, Artificial Sequence
  Target B2M Sequence complement
ttggattggatgaattccaaa

SEQ ID NO: 17348 - DNA, 21 bp, Artificial Sequence
  Target B2M Sequence complement
tggattggatgaattccaaat

SEQ ID NO: 17349 - DNA, 21 bp, Artificial Sequence
  Target B2M Sequence complement
ggattggatgaattccaaatt

SEQ ID NO: 17350 - DNA, 21 bp, Artificial Sequence
  Target B2M Sequence complement
gattggatgaattccaaattc

SEQ ID NO: 17351 - DNA, 21 bp, Artificial Sequence
  Target B2M Sequence complement
attggatgaattccaaattct

SEQ ID NO: 17352 - DNA, 21 bp, Artificial Sequence
  Target B2M Sequence complement
ttggatgaattccaaattctg

SEQ ID NO: 17353 - DNA, 21 bp, Artificial Sequence
  Target B2M Sequence complement
tggatgaattccaaattctgc

SEQ ID NO: 17354 - DNA, 21 bp, Artificial Sequence
  Target B2M Sequence complement
ggatgaattccaaattctgct

SEQ ID NO: 17355 - DNA, 21 bp, Artificial Sequence
  Target B2M Sequence complement
gatgaattccaaattctgctt

SEQ ID NO: 17356 - DNA, 21 bp, Artificial Sequence
  Target B2M Sequence complement
atgaattccaaattctgcttg

SEQ ID NO: 17357 - DNA, 21 bp, Artificial Sequence
  Target B2M Sequence complement
tgaattccaaattctgcttgc

SEQ ID NO: 17358 - DNA, 21 bp, Artificial Sequence
  Target B2M Sequence complement
gaattccaaattctgcttgct

SEQ ID NO: 17359 - DNA, 21 bp, Artificial Sequence
  Target B2M Sequence complement
aattccaaattctgcttgctt

SEQ ID NO: 17360 - DNA, 21 bp, Artificial Sequence
  Target B2M Sequence complement
attccaaattctgcttgcttg

SEQ ID NO: 17361 - DNA, 21 bp, Artificial Sequence
  Target B2M Sequence complement
ttccaaattctgcttgcttgc

SEQ ID NO: 17362 - DNA, 21 bp, Artificial Sequence
  Target B2M Sequence complement
tccaaattctgcttgcttgct

SEQ ID NO: 17363 - DNA, 21 bp, Artificial Sequence
  Target B2M Sequence complement
ccaaattctgcttgcttgctt

SEQ ID NO: 17364 - DNA, 21 bp, Artificial Sequence
  Target B2M Sequence complement
atatgcttatacacttacact

SEQ ID NO: 17365 - DNA, 21 bp, Artificial Sequence
  Target B2M Sequence complement
tatacacttacactttatgca

SEQ ID NO: 17366 - DNA, 21 bp, Artificial Sequence
  Target B2M Sequence complement
atacacttacactttatgcac

SEQ ID NO: 17367 - DNA, 21 bp, Artificial Sequence
  Target B2M Sequence complement
tacacttacactttatgcaca

SEQ ID NO: 17368 - DNA, 21 bp, Artificial Sequence
  Target B2M Sequence complement
acacttacactttatgcacaa

SEQ ID NO: 17369 - DNA, 21 bp, Artificial Sequence
  Target B2M Sequence complement
aataatgttaacatggacatg

SEQ ID NO: 17370 - DNA, 21 bp, Artificial Sequence
  Target B2M Sequence complement
aatgttaacatggacatgatc

SEQ ID NO: 17371 - DNA, 21 bp, Artificial Sequence
  Target B2M Sequence complement
aacatggacatgatcttcttt

SEQ ID NO: 17372 - DNA, 21 bp, Artificial Sequence
  Target B2M Sequence complement
ttataattctactttgagtgc

SEQ ID NO: 17373 - DNA, 21 bp, Artificial Sequence
  Target B2M Sequence complement
tataattctactttgagtgct

SEQ ID NO: 17374 - DNA, 21 bp, Artificial Sequence
  Target B2M Sequence complement
ataattctactttgagtgctg

SEQ ID NO: 17375 - DNA, 21 bp, Artificial Sequence
  Target B2M Sequence complement
taattctactttgagtgctgt

SEQ ID NO: 17376 - DNA, 21 bp, Artificial Sequence
  Target B2M Sequence complement
aattctactttgagtgctgtc

SEQ ID NO: 17377 - DNA, 21 bp, Artificial Sequence
  Target B2M Sequence complement
attctactttgagtgctgtct

SEQ ID NO: 17378 - DNA, 21 bp, Artificial Sequence
  Target B2M Sequence complement
ttctactttgagtgctgtctc

SEQ ID NO: 17379 - DNA, 21 bp, Artificial Sequence
  Target B2M Sequence complement
tctactttgagtgctgtctcc

SEQ ID NO: 17380 - DNA, 21 bp, Artificial Sequence
  Target B2M Sequence complement
ctactttgagtgctgtctcca

SEQ ID NO: 17381 - DNA, 21 bp, Artificial Sequence
  Target B2M Sequence complement
tactttgagtgctgtctccat

SEQ ID NO: 17382 - DNA, 21 bp, Artificial Sequence
  Target B2M Sequence complement
actttgagtgctgtctccatg

SEQ ID NO: 17383 - DNA, 21 bp, Artificial Sequence
  Target B2M Sequence complement
ctttgagtgctgtctccatgt

SEQ ID NO: 17384 - DNA, 21 bp, Artificial Sequence
  Target B2M Sequence complement
ctccatgtttgatgtatctga

SEQ ID NO: 17385 - DNA, 21 bp, Artificial Sequence
  Target B2M Sequence complement
tccatgtttgatgtatctgag

SEQ ID NO: 17386 - DNA, 21 bp, Artificial Sequence
  Target B2M Sequence complement
ccatgtttgatgtatctgagc

SEQ ID NO: 17387 - DNA, 21 bp, Artificial Sequence
  Target B2M Sequence complement
catgtttgatgtatctgagca

SEQ ID NO: 17388 - DNA, 21 bp, Artificial Sequence
  Target B2M Sequence complement
atgtttgatgtatctgagcag

SEQ ID NO: 17389 - DNA, 21 bp, Artificial Sequence
  Target B2M Sequence complement
tgtttgatgtatctgagcagg

SEQ ID NO: 17390 - DNA, 21 bp, Artificial Sequence
  Target B2M Sequence complement
gtttgatgtatctgagcaggt

SEQ ID NO: 17391 - DNA, 21 bp, Artificial Sequence
  Target B2M Sequence complement
tttgatgtatctgagcaggtt

SEQ ID NO: 17392 - DNA, 21 bp, Artificial Sequence
  Target B2M Sequence complement
ttgatgtatctgagcaggttg

SEQ ID NO: 17393 - DNA, 21 bp, Artificial Sequence
  Target B2M Sequence complement
tgatgtatctgagcaggttgc

SEQ ID NO: 17394 - DNA, 21 bp, Artificial Sequence
  Target B2M Sequence complement
gatgtatctgagcaggttgct

SEQ ID NO: 17395 - DNA, 21 bp, Artificial Sequence
  Target B2M Sequence complement
atgtatctgagcaggttgctc

SEQ ID NO: 17396 - DNA, 21 bp, Artificial Sequence
  Target B2M Sequence complement
tgtatctgagcaggttgctcc

SEQ ID NO: 17397 - DNA, 21 bp, Artificial Sequence
  Target B2M Sequence complement
gtatctgagcaggttgctcca

SEQ ID NO: 17398 - DNA, 21 bp, Artificial Sequence
  Target B2M Sequence complement
tatctgagcaggttgctccac

SEQ ID NO: 17399 - DNA, 21 bp, Artificial Sequence
  Target B2M Sequence complement
atctgagcaggttgctccaca

SEQ ID NO: 17400 - DNA, 21 bp, Artificial Sequence
  Target B2M Sequence complement
tctgagcaggttgctccacag

SEQ ID NO: 17401 - DNA, 21 bp, Artificial Sequence
  Target B2M Sequence complement
tgagcaggttgctccacaggt

SEQ ID NO: 17402 - DNA, 21 bp, Artificial Sequence
  Target B2M Sequence complement
gagcaggttgctccacaggta

SEQ ID NO: 17403 - DNA, 21 bp, Artificial Sequence
  Target B2M Sequence complement
agcaggttgctccacaggtag

SEQ ID NO: 17404 - DNA, 21 bp, Artificial Sequence
  Target B2M Sequence complement
caggttgctccacaggtagct

SEQ ID NO: 17405 - DNA, 21 bp, Artificial Sequence
  Target B2M Sequence complement
aggttgctccacaggtagctc

SEQ ID NO: 17406 - DNA, 21 bp, Artificial Sequence
  Target B2M Sequence complement
ttgctccacaggtagctctag

SEQ ID NO: 17407 - DNA, 21 bp, Artificial Sequence
  Target B2M Sequence complement
tgctccacaggtagctctagg

SEQ ID NO: 17408 - DNA, 21 bp, Artificial Sequence
  Target B2M Sequence complement
ctccacaggtagctctaggag

SEQ ID NO: 17409 - DNA, 21 bp, Artificial Sequence
  Target B2M Sequence complement
tccacaggtagctctaggagg

SEQ ID NO: 17410 - DNA, 21 bp, Artificial Sequence
  Target B2M Sequence complement
acaggtagctctaggagggct

SEQ ID NO: 17411 - DNA, 21 bp, Artificial Sequence
  Target B2M Sequence complement
tagctctaggagggctggcaa

SEQ ID NO: 17412 - DNA, 21 bp, Artificial Sequence
  Target B2M Sequence complement
ctctaggagggctggcaactt

SEQ ID NO: 17413 - DNA, 21 bp, Artificial Sequence
  Target B2M Sequence complement
ctaggagggctggcaacttag

SEQ ID NO: 17414 - DNA, 21 bp, Artificial Sequence
  Target B2M Sequence complement
aggagggctggcaacttagag

SEQ ID NO: 17415 - DNA, 21 bp, Artificial Sequence
  Target B2M Sequence complement
gagggctggcaacttagaggt

SEQ ID NO: 17416 - DNA, 21 bp, Artificial Sequence
  Target B2M Sequence complement
agggctggcaacttagaggtg

SEQ ID NO: 17417 - DNA, 21 bp, Artificial Sequence
  Target B2M Sequence complement
agcagagaattctcttatcca

SEQ ID NO: 17418 - DNA, 21 bp, Artificial Sequence
  Target B2M Sequence complement
gcagagaattctcttatccaa

SEQ ID NO: 17419 - DNA, 21 bp, Artificial Sequence
  Target B2M Sequence complement
cagagaattctcttatccaac

SEQ ID NO: 17420 - DNA, 21 bp, Artificial Sequence
  Target B2M Sequence complement
agagaattctcttatccaaca

SEQ ID NO: 17421 - DNA, 21 bp, Artificial Sequence
  Target B2M Sequence complement
agaattctcttatccaacatc

SEQ ID NO: 17422 - DNA, 21 bp, Artificial Sequence
  Target B2M Sequence complement
tatccaacatcaacatcttgg

SEQ ID NO: 17423 - DNA, 21 bp, Artificial Sequence
  Target B2M Sequence complement
atccaacatcaacatcttggt

SEQ ID NO: 17424 - DNA, 21 bp, Artificial Sequence
  Target B2M Sequence complement
tccaacatcaacatcttggtc

SEQ ID NO: 17425 - DNA, 21 bp, Artificial Sequence
  Target B2M Sequence complement
ccaacatcaacatcttggtca

SEQ ID NO: 17426 - DNA, 21 bp, Artificial Sequence
  Target B2M Sequence complement
caacatcaacatcttggtcag

SEQ ID NO: 17427 - DNA, 21 bp, Artificial Sequence
  Target B2M Sequence complement
atcttggtcagatttgaactc

SEQ ID NO: 17428 - DNA, 21 bp, Artificial Sequence
  Target B2M Sequence complement
tcttggtcagatttgaactct

SEQ ID NO: 17429 - DNA, 21 bp, Artificial Sequence
  Target B2M Sequence complement
ttggtcagatttgaactcttc

SEQ ID NO: 17430 - DNA, 21 bp, Artificial Sequence
  Target B2M Sequence complement
cagatttgaactcttcaatct

SEQ ID NO: 17431 - DNA, 21 bp, Artificial Sequence
  Target B2M Sequence complement
agatttgaactcttcaatctc

SEQ ID NO: 17432 - DNA, 21 bp, Artificial Sequence
  Target B2M Sequence complement
gatttgaactcttcaatctct

SEQ ID NO: 17433 - DNA, 21 bp, Artificial Sequence
  Target B2M Sequence complement
tttgaactcttcaatctcttg

SEQ ID NO: 17434 - DNA, 21 bp, Artificial Sequence
  Target B2M Sequence complement
ttgaactcttcaatctcttgc

SEQ ID NO: 17435 - DNA, 21 bp, Artificial Sequence
  Target B2M Sequence complement
tgaactcttcaatctcttgca

SEQ ID NO: 17436 - DNA, 21 bp, Artificial Sequence
  Target B2M Sequence complement
gaactcttcaatctcttgcac

SEQ ID NO: 17437 - DNA, 21 bp, Artificial Sequence
  Target B2M Sequence complement
actcttcaatctcttgcactc

SEQ ID NO: 17438 - DNA, 21 bp, Artificial Sequence
  Target B2M Sequence complement
ctcttcaatctcttgcactca

SEQ ID NO: 17439 - DNA, 21 bp, Artificial Sequence
  Target B2M Sequence complement
tcaatctcttgcactcaaagc

SEQ ID NO: 17440 - DNA, 21 bp, Artificial Sequence
  Target B2M Sequence complement
caatctcttgcactcaaagct

SEQ ID NO: 17441 - DNA, 21 bp, Artificial Sequence
  Target B2M Sequence complement
aatctcttgcactcaaagctt

SEQ ID NO: 17442 - DNA, 21 bp, Artificial Sequence
  Target B2M Sequence complement
atctcttgcactcaaagcttg

SEQ ID NO: 17443 - DNA, 21 bp, Artificial Sequence
  Target B2M Sequence complement
tctcttgcactcaaagcttgt

SEQ ID NO: 17444 - DNA, 21 bp, Artificial Sequence
  Target B2M Sequence complement
gcttgttaagatagttaagcg

SEQ ID NO: 17445 - DNA, 21 bp, Artificial Sequence
  Target B2M Sequence complement
cttgttaagatagttaagcgt

SEQ ID NO: 17446 - DNA, 21 bp, Artificial Sequence
  Target B2M Sequence complement
ttgttaagatagttaagcgtg

SEQ ID NO: 17447 - DNA, 21 bp, Artificial Sequence
  Target B2M Sequence complement
tgttaagatagttaagcgtgc

SEQ ID NO: 17448 - DNA, 21 bp, Artificial Sequence
  Target B2M Sequence complement
gttaagatagttaagcgtgca

SEQ ID NO: 17449 - DNA, 21 bp, Artificial Sequence
  Target B2M Sequence complement
ttaagatagttaagcgtgcat

SEQ ID NO: 17450 - DNA, 21 bp, Artificial Sequence
  Target B2M Sequence complement
gttaagcgtgcataagttaac

SEQ ID NO: 17451 - DNA, 21 bp, Artificial Sequence
  Target B2M Sequence complement
agcgtgcataagttaacttcc

SEQ ID NO: 17452 - DNA, 21 bp, Artificial Sequence
  Target B2M Sequence complement
gcgtgcataagttaacttcca

SEQ ID NO: 17453 - DNA, 21 bp, Artificial Sequence
  Target B2M Sequence complement
cgtgcataagttaacttccaa

SEQ ID NO: 17454 - DNA, 21 bp, Artificial Sequence
  Target B2M Sequence complement
acttccaatttacatactctg

SEQ ID NO: 17455 - DNA, 21 bp, Artificial Sequence
  Target B2M Sequence complement
cttccaatttacatactctgc

SEQ ID NO: 17456 - DNA, 21 bp, Artificial Sequence
  Target B2M Sequence complement
ttccaatttacatactctgct

SEQ ID NO: 17457 - DNA, 21 bp, Artificial Sequence
  Target B2M Sequence complement
tccaatttacatactctgctt

SEQ ID NO: 17458 - DNA, 21 bp, Artificial Sequence
  Target B2M Sequence complement
ttacatactctgcttagaatt

SEQ ID NO: 17459 - DNA, 21 bp, Artificial Sequence
  Target B2M Sequence complement
atactctgcttagaatttggg

SEQ ID NO: 17460 - DNA, 21 bp, Artificial Sequence
  Target B2M Sequence complement
tataattgacaggattattgg

SEQ ID NO: 17461 - DNA, 21 bp, Artificial Sequence
  Target B2M Sequence complement
ataattgacaggattattgga

SEQ ID NO: 17462 - DNA, 21 bp, Artificial Sequence
  Target B2M Sequence complement
taattgacaggattattggaa

SEQ ID NO: 17463 - DNA, 21 bp, Artificial Sequence
  Target B2M Sequence complement
atacatttgataaagtaaggc

SEQ ID NO: 17464 - DNA, 21 bp, Artificial Sequence
  Target B2M Sequence complement
tacatttgataaagtaaggca

SEQ ID NO: 17465 - DNA, 21 bp, Artificial Sequence
  Target B2M Sequence complement
acatttgataaagtaaggcat

SEQ ID NO: 17466 - DNA, 21 bp, Artificial Sequence
  Target B2M Sequence complement
catttgataaagtaaggcatg

SEQ ID NO: 17467 - DNA, 21 bp, Artificial Sequence
  Target B2M Sequence complement
atttgataaagtaaggcatgg

SEQ ID NO: 17468 - DNA, 21 bp, Artificial Sequence
  Target B2M Sequence complement
tttgataaagtaaggcatggt

SEQ ID NO: 17469 - DNA, 21 bp, Artificial Sequence
  Target B2M Sequence complement
ttgataaagtaaggcatggtt

SEQ ID NO: 17470 - DNA, 21 bp, Artificial Sequence
  Target B2M Sequence complement
tgataaagtaaggcatggttg

SEQ ID NO: 17471 - DNA, 21 bp, Artificial Sequence
  Target B2M Sequence complement
gataaagtaaggcatggttgt

SEQ ID NO: 17472 - DNA, 21 bp, Artificial Sequence
  Target B2M Sequence complement
ataaagtaaggcatggttgtg

SEQ ID NO: 17473 - DNA, 21 bp, Artificial Sequence
  Target B2M Sequence complement
taaagtaaggcatggttgtgg

SEQ ID NO: 17474 - DNA, 21 bp, Artificial Sequence
  Target B2M Sequence complement
aaagtaaggcatggttgtggt

SEQ ID NO: 17475 - DNA, 21 bp, Artificial Sequence
  Target B2M Sequence complement
aagtaaggcatggttgtggtt

SEQ ID NO: 17476 - DNA, 21 bp, Artificial Sequence
  Target B2M Sequence complement
gcatggttgtggttaatctgg

SEQ ID NO: 17477 - DNA, 21 bp, Artificial Sequence
  Target B2M Sequence complement
catggttgtggttaatctggt

SEQ ID NO: 17478 - DNA, 21 bp, Artificial Sequence
  Target B2M Sequence complement
atggttgtggttaatctggtt

SEQ ID NO: 17479 - DNA, 18 bp, Artificial Sequence
  Target B2M Sequence complement
attcctgaagctgacagc

SEQ ID NO: 17480 - DNA, 18 bp, Artificial Sequence
  Target B2M Sequence complement
ttcctgaagctgacagca

SEQ ID NO: 17481 - DNA, 18 bp, Artificial Sequence
  Target B2M Sequence complement
tcctgaagctgacagcat

SEQ ID NO: 17482 - DNA, 18 bp, Artificial Sequence
  Target B2M Sequence complement
cctgaagctgacagcatt

SEQ ID NO: 17483 - DNA, 18 bp, Artificial Sequence
  Target B2M Sequence complement
ctgaagctgacagcattc

SEQ ID NO: 17484 - DNA, 18 bp, Artificial Sequence
  Target B2M Sequence complement
tgaagctgacagcattcg

SEQ ID NO: 17485 - DNA, 18 bp, Artificial Sequence
  Target B2M Sequence complement
gaagctgacagcattcgg

SEQ ID NO: 17486 - DNA, 18 bp, Artificial Sequence
  Target B2M Sequence complement
aagctgacagcattcggg

SEQ ID NO: 17487 - DNA, 18 bp, Artificial Sequence
  Target B2M Sequence complement
ttagctgtgctcgcgcta

SEQ ID NO: 17488 - DNA, 18 bp, Artificial Sequence
  Target B2M Sequence complement
ctcgcgctactctctctt

SEQ ID NO: 17489 - DNA, 18 bp, Artificial Sequence
  Target B2M Sequence complement
tcgcgctactctctcttt

SEQ ID NO: 17490 - DNA, 18 bp, Artificial Sequence
  Target B2M Sequence complement
cgcgctactctctctttc

SEQ ID NO: 17491 - DNA, 18 bp, Artificial Sequence
  Target B2M Sequence complement
gcgctactctctctttct

SEQ ID NO: 17492 - DNA, 18 bp, Artificial Sequence
  Target B2M Sequence complement
cgctactctctctttctg

SEQ ID NO: 17493 - DNA, 18 bp, Artificial Sequence
  Target B2M Sequence complement
gctactctctctttctgg

SEQ ID NO: 17494 - DNA, 18 bp, Artificial Sequence
  Target B2M Sequence complement
ctactctctctttctggc

SEQ ID NO: 17495 - DNA, 18 bp, Artificial Sequence
  Target B2M Sequence complement
tactctctctttctggcc

SEQ ID NO: 17496 - DNA, 18 bp, Artificial Sequence
  Target B2M Sequence complement
actctctctttctggcct

SEQ ID NO: 17497 - DNA, 18 bp, Artificial Sequence
  Target B2M Sequence complement
ctctctctttctggcctg

SEQ ID NO: 17498 - DNA, 18 bp, Artificial Sequence
  Target B2M Sequence complement
tctctctttctggcctgg

SEQ ID NO: 17499 - DNA, 18 bp, Artificial Sequence
  Target B2M Sequence complement
ctctctttctggcctgga

SEQ ID NO: 17500 - DNA, 18 bp, Artificial Sequence
  Target B2M Sequence complement
tctctttctggcctggag

SEQ ID NO: 17501 - DNA, 18 bp, Artificial Sequence
  Target B2M Sequence complement
tttctggcctggaggcta

SEQ ID NO: 17502 - DNA, 18 bp, Artificial Sequence
  Target B2M Sequence complement
ttctggcctggaggctat

SEQ ID NO: 17503 - DNA, 18 bp, Artificial Sequence
  Target B2M Sequence complement
tggaggctatccagcgta

SEQ ID NO: 17504 - DNA, 18 bp, Artificial Sequence
  Target B2M Sequence complement
gaggctatccagcgtact

SEQ ID NO: 17505 - DNA, 18 bp, Artificial Sequence
  Target B2M Sequence complement
aggctatccagcgtactc

SEQ ID NO: 17506 - DNA, 18 bp, Artificial Sequence
  Target B2M Sequence complement
gctatccagcgtactcca

SEQ ID NO: 17507 - DNA, 18 bp, Artificial Sequence
  Target B2M Sequence complement
ctatccagcgtactccaa

SEQ ID NO: 17508 - DNA, 18 bp, Artificial Sequence
  Target B2M Sequence complement
tatccagcgtactccaaa

SEQ ID NO: 17509 - DNA, 18 bp, Artificial Sequence
  Target B2M Sequence complement
atccagcgtactccaaag

SEQ ID NO: 17510 - DNA, 18 bp, Artificial Sequence
  Target B2M Sequence complement
tccagcgtactccaaaga

SEQ ID NO: 17511 - DNA, 18 bp, Artificial Sequence
  Target B2M Sequence complement
ccagcgtactccaaagat

SEQ ID NO: 17512 - DNA, 18 bp, Artificial Sequence
  Target B2M Sequence complement
cagcgtactccaaagatt

SEQ ID NO: 17513 - DNA, 18 bp, Artificial Sequence
  Target B2M Sequence complement
agcgtactccaaagattc

SEQ ID NO: 17514 - DNA, 18 bp, Artificial Sequence
  Target B2M Sequence complement
gcgtactccaaagattca

SEQ ID NO: 17515 - DNA, 18 bp, Artificial Sequence
  Target B2M Sequence complement
cgtactccaaagattcag

SEQ ID NO: 17516 - DNA, 18 bp, Artificial Sequence
  Target B2M Sequence complement
gtactccaaagattcagg

SEQ ID NO: 17517 - DNA, 18 bp, Artificial Sequence
  Target B2M Sequence complement
tactccaaagattcaggt

SEQ ID NO: 17518 - DNA, 18 bp, Artificial Sequence
  Target B2M Sequence complement
actccaaagattcaggtt

SEQ ID NO: 17519 - DNA, 18 bp, Artificial Sequence
  Target B2M Sequence complement
ctccaaagattcaggttt

SEQ ID NO: 17520 - DNA, 18 bp, Artificial Sequence
  Target B2M Sequence complement
tccaaagattcaggttta

SEQ ID NO: 17521 - DNA, 18 bp, Artificial Sequence
  Target B2M Sequence complement
ccaaagattcaggtttac

SEQ ID NO: 17522 - DNA, 18 bp, Artificial Sequence
  Target B2M Sequence complement
caaagattcaggtttact

SEQ ID NO: 17523 - DNA, 18 bp, Artificial Sequence
  Target B2M Sequence complement
aaagattcaggtttactc

SEQ ID NO: 17524 - DNA, 18 bp, Artificial Sequence
  Target B2M Sequence complement
aagattcaggtttactca

SEQ ID NO: 17525 - DNA, 18 bp, Artificial Sequence
  Target B2M Sequence complement
agattcaggtttactcac

SEQ ID NO: 17526 - DNA, 18 bp, Artificial Sequence
  Target B2M Sequence complement
gattcaggtttactcacg

SEQ ID NO: 17527 - DNA, 18 bp, Artificial Sequence
  Target B2M Sequence complement
attcaggtttactcacgt

SEQ ID NO: 17528 - DNA, 18 bp, Artificial Sequence
  Target B2M Sequence complement
ttcaggtttactcacgtc

SEQ ID NO: 17529 - DNA, 18 bp, Artificial Sequence
  Target B2M Sequence complement
tcaggtttactcacgtca

SEQ ID NO: 17530 - DNA, 18 bp, Artificial Sequence
  Target B2M Sequence complement
caggtttactcacgtcat

SEQ ID NO: 17531 - DNA, 18 bp, Artificial Sequence
  Target B2M Sequence complement
aggtttactcacgtcatc

SEQ ID NO: 17532 - DNA, 18 bp, Artificial Sequence
  Target B2M Sequence complement
ggtttactcacgtcatcc

SEQ ID NO: 17533 - DNA, 18 bp, Artificial Sequence
  Target B2M Sequence complement
gtttactcacgtcatcca

SEQ ID NO: 17534 - DNA, 18 bp, Artificial Sequence
  Target B2M Sequence complement
tttactcacgtcatccag

SEQ ID NO: 17535 - DNA, 18 bp, Artificial Sequence
  Target B2M Sequence complement
ttactcacgtcatccagc

SEQ ID NO: 17536 - DNA, 18 bp, Artificial Sequence
  Target B2M Sequence complement
tactcacgtcatccagca

SEQ ID NO: 17537 - DNA, 18 bp, Artificial Sequence
  Target B2M Sequence complement
actcacgtcatccagcag

SEQ ID NO: 17538 - DNA, 18 bp, Artificial Sequence
  Target B2M Sequence complement
ctcacgtcatccagcaga

SEQ ID NO: 17539 - DNA, 18 bp, Artificial Sequence
  Target B2M Sequence complement
tcacgtcatccagcagag

SEQ ID NO: 17540 - DNA, 18 bp, Artificial Sequence
  Target B2M Sequence complement
cacgtcatccagcagaga

SEQ ID NO: 17541 - DNA, 18 bp, Artificial Sequence
  Target B2M Sequence complement
acgtcatccagcagagaa

SEQ ID NO: 17542 - DNA, 18 bp, Artificial Sequence
  Target B2M Sequence complement
cgtcatccagcagagaat

SEQ ID NO: 17543 - DNA, 18 bp, Artificial Sequence
  Target B2M Sequence complement
gtcatccagcagagaatg

SEQ ID NO: 17544 - DNA, 18 bp, Artificial Sequence
  Target B2M Sequence complement
tcatccagcagagaatgg

SEQ ID NO: 17545 - DNA, 18 bp, Artificial Sequence
  Target B2M Sequence complement
catccagcagagaatgga

SEQ ID NO: 17546 - DNA, 18 bp, Artificial Sequence
  Target B2M Sequence complement
atccagcagagaatggaa

SEQ ID NO: 17547 - DNA, 18 bp, Artificial Sequence
  Target B2M Sequence complement
tccagcagagaatggaaa

SEQ ID NO: 17548 - DNA, 18 bp, Artificial Sequence
  Target B2M Sequence complement
ccagcagagaatggaaag

SEQ ID NO: 17549 - DNA, 18 bp, Artificial Sequence
  Target B2M Sequence complement
cagcagagaatggaaagt

SEQ ID NO: 17550 - DNA, 18 bp, Artificial Sequence
  Target B2M Sequence complement
agcagagaatggaaagtc

SEQ ID NO: 17551 - DNA, 18 bp, Artificial Sequence
  Target B2M Sequence complement
gcagagaatggaaagtca

SEQ ID NO: 17552 - DNA, 18 bp, Artificial Sequence
  Target B2M Sequence complement
cagagaatggaaagtcaa

SEQ ID NO: 17553 - DNA, 18 bp, Artificial Sequence
  Target B2M Sequence complement
agagaatggaaagtcaaa

SEQ ID NO: 17554 - DNA, 18 bp, Artificial Sequence
  Target B2M Sequence complement
gagaatggaaagtcaaat

SEQ ID NO: 17555 - DNA, 18 bp, Artificial Sequence
  Target B2M Sequence complement
agaatggaaagtcaaatt

SEQ ID NO: 17556 - DNA, 18 bp, Artificial Sequence
  Target B2M Sequence complement
gaatggaaagtcaaattt

SEQ ID NO: 17557 - DNA, 18 bp, Artificial Sequence
  Target B2M Sequence complement
aatggaaagtcaaatttc

SEQ ID NO: 17558 - DNA, 18 bp, Artificial Sequence
  Target B2M Sequence complement
atggaaagtcaaatttcc

SEQ ID NO: 17559 - DNA, 18 bp, Artificial Sequence
  Target B2M Sequence complement
tggaaagtcaaatttcct

SEQ ID NO: 17560 - DNA, 18 bp, Artificial Sequence
  Target B2M Sequence complement
ggaaagtcaaatttcctg

SEQ ID NO: 17561 - DNA, 18 bp, Artificial Sequence
  Target B2M Sequence complement
gaaagtcaaatttcctga

SEQ ID NO: 17562 - DNA, 18 bp, Artificial Sequence
  Target B2M Sequence complement
aaagtcaaatttcctgaa

SEQ ID NO: 17563 - DNA, 18 bp, Artificial Sequence
  Target B2M Sequence complement
aagtcaaatttcctgaat

SEQ ID NO: 17564 - DNA, 18 bp, Artificial Sequence
  Target B2M Sequence complement
agtcaaatttcctgaatt

SEQ ID NO: 17565 - DNA, 18 bp, Artificial Sequence
  Target B2M Sequence complement
gtcaaatttcctgaattg

SEQ ID NO: 17566 - DNA, 18 bp, Artificial Sequence
  Target B2M Sequence complement
tcaaatttcctgaattgc

SEQ ID NO: 17567 - DNA, 18 bp, Artificial Sequence
  Target B2M Sequence complement
caaatttcctgaattgct

SEQ ID NO: 17568 - DNA, 18 bp, Artificial Sequence
  Target B2M Sequence complement
aaatttcctgaattgcta

SEQ ID NO: 17569 - DNA, 18 bp, Artificial Sequence
  Target B2M Sequence complement
aatttcctgaattgctat

SEQ ID NO: 17570 - DNA, 18 bp, Artificial Sequence
  Target B2M Sequence complement
atttcctgaattgctatg

SEQ ID NO: 17571 - DNA, 18 bp, Artificial Sequence
  Target B2M Sequence complement
tttcctgaattgctatgt

SEQ ID NO: 17572 - DNA, 18 bp, Artificial Sequence
  Target B2M Sequence complement
ttcctgaattgctatgtg

SEQ ID NO: 17573 - DNA, 18 bp, Artificial Sequence
  Target B2M Sequence complement
tcctgaattgctatgtgt

SEQ ID NO: 17574 - DNA, 18 bp, Artificial Sequence
  Target B2M Sequence complement
cctgaattgctatgtgtc

SEQ ID NO: 17575 - DNA, 18 bp, Artificial Sequence
  Target B2M Sequence complement
ctgaattgctatgtgtct

SEQ ID NO: 17576 - DNA, 18 bp, Artificial Sequence
  Target B2M Sequence complement
tgaattgctatgtgtctg

SEQ ID NO: 17577 - DNA, 18 bp, Artificial Sequence
  Target B2M Sequence complement
gaattgctatgtgtctgg

SEQ ID NO: 17578 - DNA, 18 bp, Artificial Sequence
  Target B2M Sequence complement
aattgctatgtgtctggg

SEQ ID NO: 17579 - DNA, 18 bp, Artificial Sequence
  Target B2M Sequence complement
attgctatgtgtctgggt

SEQ ID NO: 17580 - DNA, 18 bp, Artificial Sequence
  Target B2M Sequence complement
ttgctatgtgtctgggtt

SEQ ID NO: 17581 - DNA, 18 bp, Artificial Sequence
  Target B2M Sequence complement
tgctatgtgtctgggttt

SEQ ID NO: 17582 - DNA, 18 bp, Artificial Sequence
  Target B2M Sequence complement
gctatgtgtctgggtttc

SEQ ID NO: 17583 - DNA, 18 bp, Artificial Sequence
  Target B2M Sequence complement
ctatgtgtctgggtttca

SEQ ID NO: 17584 - DNA, 18 bp, Artificial Sequence
  Target B2M Sequence complement
tatgtgtctgggtttcat

SEQ ID NO: 17585 - DNA, 18 bp, Artificial Sequence
  Target B2M Sequence complement
atgtgtctgggtttcatc

SEQ ID NO: 17586 - DNA, 18 bp, Artificial Sequence
  Target B2M Sequence complement
tgtgtctgggtttcatcc

SEQ ID NO: 17587 - DNA, 18 bp, Artificial Sequence
  Target B2M Sequence complement
gtgtctgggtttcatcca

SEQ ID NO: 17588 - DNA, 18 bp, Artificial Sequence
  Target B2M Sequence complement
tgtctgggtttcatccat

SEQ ID NO: 17589 - DNA, 18 bp, Artificial Sequence
  Target B2M Sequence complement
gtctgggtttcatccatc

SEQ ID NO: 17590 - DNA, 18 bp, Artificial Sequence
  Target B2M Sequence complement
tctgggtttcatccatcc

SEQ ID NO: 17591 - DNA, 18 bp, Artificial Sequence
  Target B2M Sequence complement
ctgggtttcatccatccg

SEQ ID NO: 17592 - DNA, 18 bp, Artificial Sequence
  Target B2M Sequence complement
tgggtttcatccatccga

SEQ ID NO: 17593 - DNA, 18 bp, Artificial Sequence
  Target B2M Sequence complement
gggtttcatccatccgac

SEQ ID NO: 17594 - DNA, 18 bp, Artificial Sequence
  Target B2M Sequence complement
ggtttcatccatccgaca

SEQ ID NO: 17595 - DNA, 18 bp, Artificial Sequence
  Target B2M Sequence complement
gtttcatccatccgacat

SEQ ID NO: 17596 - DNA, 18 bp, Artificial Sequence
  Target B2M Sequence complement
tttcatccatccgacatt

SEQ ID NO: 17597 - DNA, 18 bp, Artificial Sequence
  Target B2M Sequence complement
ttcatccatccgacattg

SEQ ID NO: 17598 - DNA, 18 bp, Artificial Sequence
  Target B2M Sequence complement
tcatccatccgacattga

SEQ ID NO: 17599 - DNA, 18 bp, Artificial Sequence
  Target B2M Sequence complement
catccatccgacattgaa

SEQ ID NO: 17600 - DNA, 18 bp, Artificial Sequence
  Target B2M Sequence complement
atccatccgacattgaag

SEQ ID NO: 17601 - DNA, 18 bp, Artificial Sequence
  Target B2M Sequence complement
tccatccgacattgaagt

SEQ ID NO: 17602 - DNA, 18 bp, Artificial Sequence
  Target B2M Sequence complement
ccatccgacattgaagtt

SEQ ID NO: 17603 - DNA, 18 bp, Artificial Sequence
  Target B2M Sequence complement
catccgacattgaagttg

SEQ ID NO: 17604 - DNA, 18 bp, Artificial Sequence
  Target B2M Sequence complement
atccgacattgaagttga

SEQ ID NO: 17605 - DNA, 18 bp, Artificial Sequence
  Target B2M Sequence complement
tccgacattgaagttgac

SEQ ID NO: 17606 - DNA, 18 bp, Artificial Sequence
  Target B2M Sequence complement
ccgacattgaagttgact

SEQ ID NO: 17607 - DNA, 18 bp, Artificial Sequence
  Target B2M Sequence complement
cgacattgaagttgactt

SEQ ID NO: 17608 - DNA, 18 bp, Artificial Sequence
  Target B2M Sequence complement
gacattgaagttgactta

SEQ ID NO: 17609 - DNA, 18 bp, Artificial Sequence
  Target B2M Sequence complement
acattgaagttgacttac

SEQ ID NO: 17610 - DNA, 18 bp, Artificial Sequence
  Target B2M Sequence complement
cattgaagttgacttact

SEQ ID NO: 17611 - DNA, 18 bp, Artificial Sequence
  Target B2M Sequence complement
attgaagttgacttactg

SEQ ID NO: 17612 - DNA, 18 bp, Artificial Sequence
  Target B2M Sequence complement
ttgaagttgacttactga

SEQ ID NO: 17613 - DNA, 18 bp, Artificial Sequence
  Target B2M Sequence complement
tgaagttgacttactgaa

SEQ ID NO: 17614 - DNA, 18 bp, Artificial Sequence
  Target B2M Sequence complement
gaagttgacttactgaag

SEQ ID NO: 17615 - DNA, 18 bp, Artificial Sequence
  Target B2M Sequence complement
aagttgacttactgaaga

SEQ ID NO: 17616 - DNA, 18 bp, Artificial Sequence
  Target B2M Sequence complement
agttgacttactgaagaa

SEQ ID NO: 17617 - DNA, 18 bp, Artificial Sequence
  Target B2M Sequence complement
gttgacttactgaagaat

SEQ ID NO: 17618 - DNA, 18 bp, Artificial Sequence
  Target B2M Sequence complement
ttgacttactgaagaatg

SEQ ID NO: 17619 - DNA, 18 bp, Artificial Sequence
  Target B2M Sequence complement
tgacttactgaagaatgg

SEQ ID NO: 17620 - DNA, 18 bp, Artificial Sequence
  Target B2M Sequence complement
gacttactgaagaatgga

SEQ ID NO: 17621 - DNA, 18 bp, Artificial Sequence
  Target B2M Sequence complement
acttactgaagaatggag

SEQ ID NO: 17622 - DNA, 18 bp, Artificial Sequence
  Target B2M Sequence complement
cttactgaagaatggaga

SEQ ID NO: 17623 - DNA, 18 bp, Artificial Sequence
  Target B2M Sequence complement
ttactgaagaatggagag

SEQ ID NO: 17624 - DNA, 18 bp, Artificial Sequence
  Target B2M Sequence complement
tactgaagaatggagaga

SEQ ID NO: 17625 - DNA, 18 bp, Artificial Sequence
  Target B2M Sequence complement
actgaagaatggagagag

SEQ ID NO: 17626 - DNA, 18 bp, Artificial Sequence
  Target B2M Sequence complement
ctgaagaatggagagaga

SEQ ID NO: 17627 - DNA, 18 bp, Artificial Sequence
  Target B2M Sequence complement
tgaagaatggagagagaa

SEQ ID NO: 17628 - DNA, 18 bp, Artificial Sequence
  Target B2M Sequence complement
gaagaatggagagagaat

SEQ ID NO: 17629 - DNA, 18 bp, Artificial Sequence
  Target B2M Sequence complement
aagaatggagagagaatt

SEQ ID NO: 17630 - DNA, 18 bp, Artificial Sequence
  Target B2M Sequence complement
agaatggagagagaattg

SEQ ID NO: 17631 - DNA, 18 bp, Artificial Sequence
  Target B2M Sequence complement
gaatggagagagaattga

SEQ ID NO: 17632 - DNA, 18 bp, Artificial Sequence
  Target B2M Sequence complement
aatggagagagaattgaa

SEQ ID NO: 17633 - DNA, 18 bp, Artificial Sequence
  Target B2M Sequence complement
atggagagagaattgaaa

SEQ ID NO: 17634 - DNA, 18 bp, Artificial Sequence
  Target B2M Sequence complement
aaagtggagcattcagac

SEQ ID NO: 17635 - DNA, 18 bp, Artificial Sequence
  Target B2M Sequence complement
aagtggagcattcagact

SEQ ID NO: 17636 - DNA, 18 bp, Artificial Sequence
  Target B2M Sequence complement
agtggagcattcagactt

SEQ ID NO: 17637 - DNA, 18 bp, Artificial Sequence
  Target B2M Sequence complement
gtggagcattcagacttg

SEQ ID NO: 17638 - DNA, 18 bp, Artificial Sequence
  Target B2M Sequence complement
tggagcattcagacttgt

SEQ ID NO: 17639 - DNA, 18 bp, Artificial Sequence
  Target B2M Sequence complement
ggagcattcagacttgtc

SEQ ID NO: 17640 - DNA, 18 bp, Artificial Sequence
  Target B2M Sequence complement
gagcattcagacttgtct

SEQ ID NO: 17641 - DNA, 18 bp, Artificial Sequence
  Target B2M Sequence complement
agcattcagacttgtctt

SEQ ID NO: 17642 - DNA, 18 bp, Artificial Sequence
  Target B2M Sequence complement
gcattcagacttgtcttt

SEQ ID NO: 17643 - DNA, 18 bp, Artificial Sequence
  Target B2M Sequence complement
cattcagacttgtctttc

SEQ ID NO: 17644 - DNA, 18 bp, Artificial Sequence
  Target B2M Sequence complement
attcagacttgtctttca

SEQ ID NO: 17645 - DNA, 18 bp, Artificial Sequence
  Target B2M Sequence complement
ttcagacttgtctttcag

SEQ ID NO: 17646 - DNA, 18 bp, Artificial Sequence
  Target B2M Sequence complement
tcagacttgtctttcagc

SEQ ID NO: 17647 - DNA, 18 bp, Artificial Sequence
  Target B2M Sequence complement
cagacttgtctttcagca

SEQ ID NO: 17648 - DNA, 18 bp, Artificial Sequence
  Target B2M Sequence complement
agacttgtctttcagcaa

SEQ ID NO: 17649 - DNA, 18 bp, Artificial Sequence
  Target B2M Sequence complement
gacttgtctttcagcaag

SEQ ID NO: 17650 - DNA, 18 bp, Artificial Sequence
  Target B2M Sequence complement
acttgtctttcagcaagg

SEQ ID NO: 17651 - DNA, 18 bp, Artificial Sequence
  Target B2M Sequence complement
cttgtctttcagcaagga

SEQ ID NO: 17652 - DNA, 18 bp, Artificial Sequence
  Target B2M Sequence complement
ttgtctttcagcaaggac

SEQ ID NO: 17653 - DNA, 18 bp, Artificial Sequence
  Target B2M Sequence complement
tgtctttcagcaaggact

SEQ ID NO: 17654 - DNA, 18 bp, Artificial Sequence
  Target B2M Sequence complement
gtctttcagcaaggactg

SEQ ID NO: 17655 - DNA, 18 bp, Artificial Sequence
  Target B2M Sequence complement
tctttcagcaaggactgg

SEQ ID NO: 17656 - DNA, 18 bp, Artificial Sequence
  Target B2M Sequence complement
ctttcagcaaggactggt

SEQ ID NO: 17657 - DNA, 18 bp, Artificial Sequence
  Target B2M Sequence complement
tttcagcaaggactggtc

SEQ ID NO: 17658 - DNA, 18 bp, Artificial Sequence
  Target B2M Sequence complement
ttcagcaaggactggtct

SEQ ID NO: 17659 - DNA, 18 bp, Artificial Sequence
  Target B2M Sequence complement
tcagcaaggactggtctt

SEQ ID NO: 17660 - DNA, 18 bp, Artificial Sequence
  Target B2M Sequence complement
cagcaaggactggtcttt

SEQ ID NO: 17661 - DNA, 18 bp, Artificial Sequence
  Target B2M Sequence complement
agcaaggactggtctttc

SEQ ID NO: 17662 - DNA, 18 bp, Artificial Sequence
  Target B2M Sequence complement
gcaaggactggtctttct

SEQ ID NO: 17663 - DNA, 18 bp, Artificial Sequence
  Target B2M Sequence complement
caaggactggtctttcta

SEQ ID NO: 17664 - DNA, 18 bp, Artificial Sequence
  Target B2M Sequence complement
aaggactggtctttctat

SEQ ID NO: 17665 - DNA, 18 bp, Artificial Sequence
  Target B2M Sequence complement
aggactggtctttctatc

SEQ ID NO: 17666 - DNA, 18 bp, Artificial Sequence
  Target B2M Sequence complement
ggactggtctttctatct

SEQ ID NO: 17667 - DNA, 18 bp, Artificial Sequence
  Target B2M Sequence complement
gactggtctttctatctc

SEQ ID NO: 17668 - DNA, 18 bp, Artificial Sequence
  Target B2M Sequence complement
actggtctttctatctct

SEQ ID NO: 17669 - DNA, 18 bp, Artificial Sequence
  Target B2M Sequence complement
ctggtctttctatctctt

SEQ ID NO: 17670 - DNA, 18 bp, Artificial Sequence
  Target B2M Sequence complement
tggtctttctatctcttg

SEQ ID NO: 17671 - DNA, 18 bp, Artificial Sequence
  Target B2M Sequence complement
ggtctttctatctcttgt

SEQ ID NO: 17672 - DNA, 18 bp, Artificial Sequence
  Target B2M Sequence complement
gtctttctatctcttgta

SEQ ID NO: 17673 - DNA, 18 bp, Artificial Sequence
  Target B2M Sequence complement
tctttctatctcttgtac

SEQ ID NO: 17674 - DNA, 18 bp, Artificial Sequence
  Target B2M Sequence complement
ctttctatctcttgtact

SEQ ID NO: 17675 - DNA, 18 bp, Artificial Sequence
  Target B2M Sequence complement
tttctatctcttgtacta

SEQ ID NO: 17676 - DNA, 18 bp, Artificial Sequence
  Target B2M Sequence complement
ttctatctcttgtactac

SEQ ID NO: 17677 - DNA, 18 bp, Artificial Sequence
  Target B2M Sequence complement
tctatctcttgtactaca

SEQ ID NO: 17678 - DNA, 18 bp, Artificial Sequence
  Target B2M Sequence complement
ctatctcttgtactacac

SEQ ID NO: 17679 - DNA, 18 bp, Artificial Sequence
  Target B2M Sequence complement
tatctcttgtactacact

SEQ ID NO: 17680 - DNA, 18 bp, Artificial Sequence
  Target B2M Sequence complement
atctcttgtactacactg

SEQ ID NO: 17681 - DNA, 18 bp, Artificial Sequence
  Target B2M Sequence complement
tctcttgtactacactga

SEQ ID NO: 17682 - DNA, 18 bp, Artificial Sequence
  Target B2M Sequence complement
ctcttgtactacactgaa

SEQ ID NO: 17683 - DNA, 18 bp, Artificial Sequence
  Target B2M Sequence complement
tcttgtactacactgaat

SEQ ID NO: 17684 - DNA, 18 bp, Artificial Sequence
  Target B2M Sequence complement
cttgtactacactgaatt

SEQ ID NO: 17685 - DNA, 18 bp, Artificial Sequence
  Target B2M Sequence complement
ttgtactacactgaattc

SEQ ID NO: 17686 - DNA, 18 bp, Artificial Sequence
  Target B2M Sequence complement
tgtactacactgaattca

SEQ ID NO: 17687 - DNA, 18 bp, Artificial Sequence
  Target B2M Sequence complement
gtactacactgaattcac

SEQ ID NO: 17688 - DNA, 18 bp, Artificial Sequence
  Target B2M Sequence complement
tactacactgaattcacc

SEQ ID NO: 17689 - DNA, 18 bp, Artificial Sequence
  Target B2M Sequence complement
actacactgaattcaccc

SEQ ID NO: 17690 - DNA, 18 bp, Artificial Sequence
  Target B2M Sequence complement
aaagatgagtatgcctgc

SEQ ID NO: 17691 - DNA, 18 bp, Artificial Sequence
  Target B2M Sequence complement
aagatgagtatgcctgcc

SEQ ID NO: 17692 - DNA, 18 bp, Artificial Sequence
  Target B2M Sequence complement
agatgagtatgcctgccg

SEQ ID NO: 17693 - DNA, 18 bp, Artificial Sequence
  Target B2M Sequence complement
gatgagtatgcctgccgt

SEQ ID NO: 17694 - DNA, 18 bp, Artificial Sequence
  Target B2M Sequence complement
atgagtatgcctgccgtg

SEQ ID NO: 17695 - DNA, 18 bp, Artificial Sequence
  Target B2M Sequence complement
tgagtatgcctgccgtgt

SEQ ID NO: 17696 - DNA, 18 bp, Artificial Sequence
  Target B2M Sequence complement
agtatgcctgccgtgtga

SEQ ID NO: 17697 - DNA, 18 bp, Artificial Sequence
  Target B2M Sequence complement
gtatgcctgccgtgtgaa

SEQ ID NO: 17698 - DNA, 18 bp, Artificial Sequence
  Target B2M Sequence complement
tatgcctgccgtgtgaac

SEQ ID NO: 17699 - DNA, 18 bp, Artificial Sequence
  Target B2M Sequence complement
ctgccgtgtgaaccatgt

SEQ ID NO: 17700 - DNA, 18 bp, Artificial Sequence
  Target B2M Sequence complement
tgccgtgtgaaccatgtg

SEQ ID NO: 17701 - DNA, 18 bp, Artificial Sequence
  Target B2M Sequence complement
gccgtgtgaaccatgtga

SEQ ID NO: 17702 - DNA, 18 bp, Artificial Sequence
  Target B2M Sequence complement
ccgtgtgaaccatgtgac

SEQ ID NO: 17703 - DNA, 18 bp, Artificial Sequence
  Target B2M Sequence complement
cgtgtgaaccatgtgact

SEQ ID NO: 17704 - DNA, 18 bp, Artificial Sequence
  Target B2M Sequence complement
gtgtgaaccatgtgactt

SEQ ID NO: 17705 - DNA, 18 bp, Artificial Sequence
  Target B2M Sequence complement
tgtgaaccatgtgacttt

SEQ ID NO: 17706 - DNA, 18 bp, Artificial Sequence
  Target B2M Sequence complement
gtgaaccatgtgactttg

SEQ ID NO: 17707 - DNA, 18 bp, Artificial Sequence
  Target B2M Sequence complement
tgaaccatgtgactttgt

SEQ ID NO: 17708 - DNA, 18 bp, Artificial Sequence
  Target B2M Sequence complement
gaaccatgtgactttgtc

SEQ ID NO: 17709 - DNA, 18 bp, Artificial Sequence
  Target B2M Sequence complement
aaccatgtgactttgtca

SEQ ID NO: 17710 - DNA, 18 bp, Artificial Sequence
  Target B2M Sequence complement
accatgtgactttgtcac

SEQ ID NO: 17711 - DNA, 18 bp, Artificial Sequence
  Target B2M Sequence complement
ccatgtgactttgtcaca

SEQ ID NO: 17712 - DNA, 18 bp, Artificial Sequence
  Target B2M Sequence complement
catgtgactttgtcacag

SEQ ID NO: 17713 - DNA, 18 bp, Artificial Sequence
  Target B2M Sequence complement
atgtgactttgtcacagc

SEQ ID NO: 17714 - DNA, 18 bp, Artificial Sequence
  Target B2M Sequence complement
tgtgactttgtcacagcc

SEQ ID NO: 17715 - DNA, 18 bp, Artificial Sequence
  Target B2M Sequence complement
gtgactttgtcacagccc

SEQ ID NO: 17716 - DNA, 18 bp, Artificial Sequence
  Target B2M Sequence complement
tgactttgtcacagccca

SEQ ID NO: 17717 - DNA, 18 bp, Artificial Sequence
  Target B2M Sequence complement
gactttgtcacagcccaa

SEQ ID NO: 17718 - DNA, 18 bp, Artificial Sequence
  Target B2M Sequence complement
actttgtcacagcccaag

SEQ ID NO: 17719 - DNA, 18 bp, Artificial Sequence
  Target B2M Sequence complement
ctttgtcacagcccaaga

SEQ ID NO: 17720 - DNA, 18 bp, Artificial Sequence
  Target B2M Sequence complement
tttgtcacagcccaagat

SEQ ID NO: 17721 - DNA, 18 bp, Artificial Sequence
  Target B2M Sequence complement
ttgtcacagcccaagata

SEQ ID NO: 17722 - DNA, 18 bp, Artificial Sequence
  Target B2M Sequence complement
tgtcacagcccaagatag

SEQ ID NO: 17723 - DNA, 18 bp, Artificial Sequence
  Target B2M Sequence complement
gtcacagcccaagatagt

SEQ ID NO: 17724 - DNA, 18 bp, Artificial Sequence
  Target B2M Sequence complement
tcacagcccaagatagtt

SEQ ID NO: 17725 - DNA, 18 bp, Artificial Sequence
  Target B2M Sequence complement
cacagcccaagatagtta

SEQ ID NO: 17726 - DNA, 18 bp, Artificial Sequence
  Target B2M Sequence complement
acagcccaagatagttaa

SEQ ID NO: 17727 - DNA, 18 bp, Artificial Sequence
  Target B2M Sequence complement
cagcccaagatagttaag

SEQ ID NO: 17728 - DNA, 18 bp, Artificial Sequence
  Target B2M Sequence complement
agcccaagatagttaagt

SEQ ID NO: 17729 - DNA, 18 bp, Artificial Sequence
  Target B2M Sequence complement
gcccaagatagttaagtg

SEQ ID NO: 17730 - DNA, 18 bp, Artificial Sequence
  Target B2M Sequence complement
cccaagatagttaagtgg

SEQ ID NO: 17731 - DNA, 18 bp, Artificial Sequence
  Target B2M Sequence complement
ccaagatagttaagtggg

SEQ ID NO: 17732 - DNA, 18 bp, Artificial Sequence
  Target B2M Sequence complement
caagatagttaagtggga

SEQ ID NO: 17733 - DNA, 18 bp, Artificial Sequence
  Target B2M Sequence complement
aagatagttaagtgggat

SEQ ID NO: 17734 - DNA, 18 bp, Artificial Sequence
  Target B2M Sequence complement
agatagttaagtgggatc

SEQ ID NO: 17735 - DNA, 18 bp, Artificial Sequence
  Target B2M Sequence complement
gatagttaagtgggatcg

SEQ ID NO: 17736 - DNA, 18 bp, Artificial Sequence
  Target B2M Sequence complement
atagttaagtgggatcga

SEQ ID NO: 17737 - DNA, 18 bp, Artificial Sequence
  Target B2M Sequence complement
tagttaagtgggatcgag

SEQ ID NO: 17738 - DNA, 18 bp, Artificial Sequence
  Target B2M Sequence complement
agttaagtgggatcgaga

SEQ ID NO: 17739 - DNA, 18 bp, Artificial Sequence
  Target B2M Sequence complement
gttaagtgggatcgagac

SEQ ID NO: 17740 - DNA, 18 bp, Artificial Sequence
  Target B2M Sequence complement
ttaagtgggatcgagaca

SEQ ID NO: 17741 - DNA, 18 bp, Artificial Sequence
  Target B2M Sequence complement
taagtgggatcgagacat

SEQ ID NO: 17742 - DNA, 18 bp, Artificial Sequence
  Target B2M Sequence complement
aagtgggatcgagacatg

SEQ ID NO: 17743 - DNA, 18 bp, Artificial Sequence
  Target B2M Sequence complement
agtgggatcgagacatgt

SEQ ID NO: 17744 - DNA, 18 bp, Artificial Sequence
  Target B2M Sequence complement
gtgggatcgagacatgta

SEQ ID NO: 17745 - DNA, 18 bp, Artificial Sequence
  Target B2M Sequence complement
tgggatcgagacatgtaa

SEQ ID NO: 17746 - DNA, 18 bp, Artificial Sequence
  Target B2M Sequence complement
gggatcgagacatgtaag

SEQ ID NO: 17747 - DNA, 18 bp, Artificial Sequence
  Target B2M Sequence complement
ggatcgagacatgtaagc

SEQ ID NO: 17748 - DNA, 18 bp, Artificial Sequence
  Target B2M Sequence complement
gatcgagacatgtaagca

SEQ ID NO: 17749 - DNA, 18 bp, Artificial Sequence
  Target B2M Sequence complement
atcgagacatgtaagcag

SEQ ID NO: 17750 - DNA, 18 bp, Artificial Sequence
  Target B2M Sequence complement
tcgagacatgtaagcagc

SEQ ID NO: 17751 - DNA, 18 bp, Artificial Sequence
  Target B2M Sequence complement
cgagacatgtaagcagca

SEQ ID NO: 17752 - DNA, 18 bp, Artificial Sequence
  Target B2M Sequence complement
gagacatgtaagcagcat

SEQ ID NO: 17753 - DNA, 18 bp, Artificial Sequence
  Target B2M Sequence complement
agacatgtaagcagcatc

SEQ ID NO: 17754 - DNA, 18 bp, Artificial Sequence
  Target B2M Sequence complement
gacatgtaagcagcatca

SEQ ID NO: 17755 - DNA, 18 bp, Artificial Sequence
  Target B2M Sequence complement
acatgtaagcagcatcat

SEQ ID NO: 17756 - DNA, 18 bp, Artificial Sequence
  Target B2M Sequence complement
catgtaagcagcatcatg

SEQ ID NO: 17757 - DNA, 18 bp, Artificial Sequence
  Target B2M Sequence complement
atgtaagcagcatcatgg

SEQ ID NO: 17758 - DNA, 18 bp, Artificial Sequence
  Target B2M Sequence complement
tgtaagcagcatcatgga

SEQ ID NO: 17759 - DNA, 18 bp, Artificial Sequence
  Target B2M Sequence complement
gtaagcagcatcatggag

SEQ ID NO: 17760 - DNA, 18 bp, Artificial Sequence
  Target B2M Sequence complement
taagcagcatcatggagg

SEQ ID NO: 17761 - DNA, 18 bp, Artificial Sequence
  Target B2M Sequence complement
aagcagcatcatggaggt

SEQ ID NO: 17762 - DNA, 18 bp, Artificial Sequence
  Target B2M Sequence complement
agcagcatcatggaggtt

SEQ ID NO: 17763 - DNA, 18 bp, Artificial Sequence
  Target B2M Sequence complement
gcagcatcatggaggttt

SEQ ID NO: 17764 - DNA, 18 bp, Artificial Sequence
  Target B2M Sequence complement
cagcatcatggaggtttg

SEQ ID NO: 17765 - DNA, 18 bp, Artificial Sequence
  Target B2M Sequence complement
agcatcatggaggtttga

SEQ ID NO: 17766 - DNA, 18 bp, Artificial Sequence
  Target B2M Sequence complement
gcatcatggaggtttgaa

SEQ ID NO: 17767 - DNA, 18 bp, Artificial Sequence
  Target B2M Sequence complement
catcatggaggtttgaag

SEQ ID NO: 17768 - DNA, 18 bp, Artificial Sequence
  Target B2M Sequence complement
atcatggaggtttgaaga

SEQ ID NO: 17769 - DNA, 18 bp, Artificial Sequence
  Target B2M Sequence complement
tcatggaggtttgaagat

SEQ ID NO: 17770 - DNA, 18 bp, Artificial Sequence
  Target B2M Sequence complement
catggaggtttgaagatg

SEQ ID NO: 17771 - DNA, 18 bp, Artificial Sequence
  Target B2M Sequence complement
atggaggtttgaagatgc

SEQ ID NO: 17772 - DNA, 18 bp, Artificial Sequence
  Target B2M Sequence complement
tggaggtttgaagatgcc

SEQ ID NO: 17773 - DNA, 18 bp, Artificial Sequence
  Target B2M Sequence complement
ggaggtttgaagatgccg

SEQ ID NO: 17774 - DNA, 18 bp, Artificial Sequence
  Target B2M Sequence complement
gaggtttgaagatgccgc

SEQ ID NO: 17775 - DNA, 18 bp, Artificial Sequence
  Target B2M Sequence complement
aggtttgaagatgccgca

SEQ ID NO: 17776 - DNA, 18 bp, Artificial Sequence
  Target B2M Sequence complement
ggtttgaagatgccgcat

SEQ ID NO: 17777 - DNA, 18 bp, Artificial Sequence
  Target B2M Sequence complement
gtttgaagatgccgcatt

SEQ ID NO: 17778 - DNA, 18 bp, Artificial Sequence
  Target B2M Sequence complement
tttgaagatgccgcattt

SEQ ID NO: 17779 - DNA, 18 bp, Artificial Sequence
  Target B2M Sequence complement
ttgaagatgccgcatttg

SEQ ID NO: 17780 - DNA, 18 bp, Artificial Sequence
  Target B2M Sequence complement
tgaagatgccgcatttgg

SEQ ID NO: 17781 - DNA, 18 bp, Artificial Sequence
  Target B2M Sequence complement
gaagatgccgcatttgga

SEQ ID NO: 17782 - DNA, 18 bp, Artificial Sequence
  Target B2M Sequence complement
aagatgccgcatttggat

SEQ ID NO: 17783 - DNA, 18 bp, Artificial Sequence
  Target B2M Sequence complement
agatgccgcatttggatt

SEQ ID NO: 17784 - DNA, 18 bp, Artificial Sequence
  Target B2M Sequence complement
gatgccgcatttggattg

SEQ ID NO: 17785 - DNA, 18 bp, Artificial Sequence
  Target B2M Sequence complement
atgccgcatttggattgg

SEQ ID NO: 17786 - DNA, 18 bp, Artificial Sequence
  Target B2M Sequence complement
tgccgcatttggattgga

SEQ ID NO: 17787 - DNA, 18 bp, Artificial Sequence
  Target B2M Sequence complement
gccgcatttggattggat

SEQ ID NO: 17788 - DNA, 18 bp, Artificial Sequence
  Target B2M Sequence complement
ccgcatttggattggatg

SEQ ID NO: 17789 - DNA, 18 bp, Artificial Sequence
  Target B2M Sequence complement
cgcatttggattggatga

SEQ ID NO: 17790 - DNA, 18 bp, Artificial Sequence
  Target B2M Sequence complement
gcatttggattggatgaa

SEQ ID NO: 17791 - DNA, 18 bp, Artificial Sequence
  Target B2M Sequence complement
catttggattggatgaat

SEQ ID NO: 17792 - DNA, 18 bp, Artificial Sequence
  Target B2M Sequence complement
atttggattggatgaatt

SEQ ID NO: 17793 - DNA, 18 bp, Artificial Sequence
  Target B2M Sequence complement
tttggattggatgaattc

SEQ ID NO: 17794 - DNA, 18 bp, Artificial Sequence
  Target B2M Sequence complement
ttggattggatgaattcc

SEQ ID NO: 17795 - DNA, 18 bp, Artificial Sequence
  Target B2M Sequence complement
tggattggatgaattcca

SEQ ID NO: 17796 - DNA, 18 bp, Artificial Sequence
  Target B2M Sequence complement
ggattggatgaattccaa

SEQ ID NO: 17797 - DNA, 18 bp, Artificial Sequence
  Target B2M Sequence complement
gattggatgaattccaaa

SEQ ID NO: 17798 - DNA, 18 bp, Artificial Sequence
  Target B2M Sequence complement
attggatgaattccaaat

SEQ ID NO: 17799 - DNA, 18 bp, Artificial Sequence
  Target B2M Sequence complement
ttggatgaattccaaatt

SEQ ID NO: 17800 - DNA, 18 bp, Artificial Sequence
  Target B2M Sequence complement
tggatgaattccaaattc

SEQ ID NO: 17801 - DNA, 18 bp, Artificial Sequence
  Target B2M Sequence complement
ggatgaattccaaattct

SEQ ID NO: 17802 - DNA, 18 bp, Artificial Sequence
  Target B2M Sequence complement
gatgaattccaaattctg

SEQ ID NO: 17803 - DNA, 18 bp, Artificial Sequence
  Target B2M Sequence complement
atgaattccaaattctgc

SEQ ID NO: 17804 - DNA, 18 bp, Artificial Sequence
  Target B2M Sequence complement
tgaattccaaattctgct

SEQ ID NO: 17805 - DNA, 18 bp, Artificial Sequence
  Target B2M Sequence complement
gaattccaaattctgctt

SEQ ID NO: 17806 - DNA, 18 bp, Artificial Sequence
  Target B2M Sequence complement
aattccaaattctgcttg

SEQ ID NO: 17807 - DNA, 18 bp, Artificial Sequence
  Target B2M Sequence complement
attccaaattctgcttgc

SEQ ID NO: 17808 - DNA, 18 bp, Artificial Sequence
  Target B2M Sequence complement
ttccaaattctgcttgct

SEQ ID NO: 17809 - DNA, 18 bp, Artificial Sequence
  Target B2M Sequence complement
tccaaattctgcttgctt

SEQ ID NO: 17810 - DNA, 18 bp, Artificial Sequence
  Target B2M Sequence complement
ccaaattctgcttgcttg

SEQ ID NO: 17811 - DNA, 18 bp, Artificial Sequence
  Target B2M Sequence complement
caaattctgcttgcttgc

SEQ ID NO: 17812 - DNA, 18 bp, Artificial Sequence
  Target B2M Sequence complement
aaattctgcttgcttgct

SEQ ID NO: 17813 - DNA, 18 bp, Artificial Sequence
  Target B2M Sequence complement
aattctgcttgcttgctt

SEQ ID NO: 17814 - DNA, 18 bp, Artificial Sequence
  Target B2M Sequence complement
attctgcttgcttgcttt

SEQ ID NO: 17815 - DNA, 18 bp, Artificial Sequence
  Target B2M Sequence complement
attgatatgcttatacac

SEQ ID NO: 17816 - DNA, 18 bp, Artificial Sequence
  Target B2M Sequence complement
ttgatatgcttatacact

SEQ ID NO: 17817 - DNA, 18 bp, Artificial Sequence
  Target B2M Sequence complement
tgatatgcttatacactt

SEQ ID NO: 17818 - DNA, 18 bp, Artificial Sequence
  Target B2M Sequence complement
gatatgcttatacactta

SEQ ID NO: 17819 - DNA, 18 bp, Artificial Sequence
  Target B2M Sequence complement
atatgcttatacacttac

SEQ ID NO: 17820 - DNA, 18 bp, Artificial Sequence
  Target B2M Sequence complement
tatgcttatacacttaca

SEQ ID NO: 17821 - DNA, 18 bp, Artificial Sequence
  Target B2M Sequence complement
atgcttatacacttacac

SEQ ID NO: 17822 - DNA, 18 bp, Artificial Sequence
  Target B2M Sequence complement
tgcttatacacttacact

SEQ ID NO: 17823 - DNA, 18 bp, Artificial Sequence
  Target B2M Sequence complement
gcttatacacttacactt

SEQ ID NO: 17824 - DNA, 18 bp, Artificial Sequence
  Target B2M Sequence complement
cttatacacttacacttt

SEQ ID NO: 17825 - DNA, 18 bp, Artificial Sequence
  Target B2M Sequence complement
atacacttacactttatg

SEQ ID NO: 17826 - DNA, 18 bp, Artificial Sequence
  Target B2M Sequence complement
tacacttacactttatgc

SEQ ID NO: 17827 - DNA, 18 bp, Artificial Sequence
  Target B2M Sequence complement
acacttacactttatgca

SEQ ID NO: 17828 - DNA, 18 bp, Artificial Sequence
  Target B2M Sequence complement
cacttacactttatgcac

SEQ ID NO: 17829 - DNA, 18 bp, Artificial Sequence
  Target B2M Sequence complement
acttacactttatgcaca

SEQ ID NO: 17830 - DNA, 18 bp, Artificial Sequence
  Target B2M Sequence complement
cttacactttatgcacaa

SEQ ID NO: 17831 - DNA, 18 bp, Artificial Sequence
  Target B2M Sequence complement
ttacactttatgcacaaa

SEQ ID NO: 17832 - DNA, 18 bp, Artificial Sequence
  Target B2M Sequence complement
tgtagggttataataatg

SEQ ID NO: 17833 - DNA, 18 bp, Artificial Sequence
  Target B2M Sequence complement
gtagggttataataatgt

SEQ ID NO: 17834 - DNA, 18 bp, Artificial Sequence
  Target B2M Sequence complement
aataatgttaacatggac

SEQ ID NO: 17835 - DNA, 18 bp, Artificial Sequence
  Target B2M Sequence complement
ataatgttaacatggaca

SEQ ID NO: 17836 - DNA, 18 bp, Artificial Sequence
  Target B2M Sequence complement
taatgttaacatggacat

SEQ ID NO: 17837 - DNA, 18 bp, Artificial Sequence
  Target B2M Sequence complement
aatgttaacatggacatg

SEQ ID NO: 17838 - DNA, 18 bp, Artificial Sequence
  Target B2M Sequence complement
atgttaacatggacatga

SEQ ID NO: 17839 - DNA, 18 bp, Artificial Sequence
  Target B2M Sequence complement
tgttaacatggacatgat

SEQ ID NO: 17840 - DNA, 18 bp, Artificial Sequence
  Target B2M Sequence complement
gttaacatggacatgatc

SEQ ID NO: 17841 - DNA, 18 bp, Artificial Sequence
  Target B2M Sequence complement
ttaacatggacatgatct

SEQ ID NO: 17842 - DNA, 18 bp, Artificial Sequence
  Target B2M Sequence complement
taacatggacatgatctt

SEQ ID NO: 17843 - DNA, 18 bp, Artificial Sequence
  Target B2M Sequence complement
aacatggacatgatcttc

SEQ ID NO: 17844 - DNA, 18 bp, Artificial Sequence
  Target B2M Sequence complement
acatggacatgatcttct

SEQ ID NO: 17845 - DNA, 18 bp, Artificial Sequence
  Target B2M Sequence complement
catggacatgatcttctt

SEQ ID NO: 17846 - DNA, 18 bp, Artificial Sequence
  Target B2M Sequence complement
atggacatgatcttcttt

SEQ ID NO: 17847 - DNA, 18 bp, Artificial Sequence
  Target B2M Sequence complement
tggacatgatcttcttta

SEQ ID NO: 17848 - DNA, 18 bp, Artificial Sequence
  Target B2M Sequence complement
ggacatgatcttctttat

SEQ ID NO: 17849 - DNA, 18 bp, Artificial Sequence
  Target B2M Sequence complement
gacatgatcttctttata

SEQ ID NO: 17850 - DNA, 18 bp, Artificial Sequence
  Target B2M Sequence complement
ataattctactttgagtg

SEQ ID NO: 17851 - DNA, 18 bp, Artificial Sequence
  Target B2M Sequence complement
taattctactttgagtgc

SEQ ID NO: 17852 - DNA, 18 bp, Artificial Sequence
  Target B2M Sequence complement
aattctactttgagtgct

SEQ ID NO: 17853 - DNA, 18 bp, Artificial Sequence
  Target B2M Sequence complement
attctactttgagtgctg

SEQ ID NO: 17854 - DNA, 18 bp, Artificial Sequence
  Target B2M Sequence complement
ttctactttgagtgctgt

SEQ ID NO: 17855 - DNA, 18 bp, Artificial Sequence
  Target B2M Sequence complement
tctactttgagtgctgtc

SEQ ID NO: 17856 - DNA, 18 bp, Artificial Sequence
  Target B2M Sequence complement
ctactttgagtgctgtct

SEQ ID NO: 17857 - DNA, 18 bp, Artificial Sequence
  Target B2M Sequence complement
tactttgagtgctgtctc

SEQ ID NO: 17858 - DNA, 18 bp, Artificial Sequence
  Target B2M Sequence complement
actttgagtgctgtctcc

SEQ ID NO: 17859 - DNA, 18 bp, Artificial Sequence
  Target B2M Sequence complement
ctttgagtgctgtctcca

SEQ ID NO: 17860 - DNA, 18 bp, Artificial Sequence
  Target B2M Sequence complement
tttgagtgctgtctccat

SEQ ID NO: 17861 - DNA, 18 bp, Artificial Sequence
  Target B2M Sequence complement
ttgagtgctgtctccatg

SEQ ID NO: 17862 - DNA, 18 bp, Artificial Sequence
  Target B2M Sequence complement
tgagtgctgtctccatgt

SEQ ID NO: 17863 - DNA, 18 bp, Artificial Sequence
  Target B2M Sequence complement
gagtgctgtctccatgtt

SEQ ID NO: 17864 - DNA, 18 bp, Artificial Sequence
  Target B2M Sequence complement
agtgctgtctccatgttt

SEQ ID NO: 17865 - DNA, 18 bp, Artificial Sequence
  Target B2M Sequence complement
gtgctgtctccatgtttg

SEQ ID NO: 17866 - DNA, 18 bp, Artificial Sequence
  Target B2M Sequence complement
tgctgtctccatgtttga

SEQ ID NO: 17867 - DNA, 18 bp, Artificial Sequence
  Target B2M Sequence complement
gctgtctccatgtttgat

SEQ ID NO: 17868 - DNA, 18 bp, Artificial Sequence
  Target B2M Sequence complement
ctgtctccatgtttgatg

SEQ ID NO: 17869 - DNA, 18 bp, Artificial Sequence
  Target B2M Sequence complement
tgtctccatgtttgatgt

SEQ ID NO: 17870 - DNA, 18 bp, Artificial Sequence
  Target B2M Sequence complement
gtctccatgtttgatgta

SEQ ID NO: 17871 - DNA, 18 bp, Artificial Sequence
  Target B2M Sequence complement
tctccatgtttgatgtat

SEQ ID NO: 17872 - DNA, 18 bp, Artificial Sequence
  Target B2M Sequence complement
ctccatgtttgatgtatc

SEQ ID NO: 17873 - DNA, 18 bp, Artificial Sequence
  Target B2M Sequence complement
tccatgtttgatgtatct

SEQ ID NO: 17874 - DNA, 18 bp, Artificial Sequence
  Target B2M Sequence complement
ccatgtttgatgtatctg

SEQ ID NO: 17875 - DNA, 18 bp, Artificial Sequence
  Target B2M Sequence complement
catgtttgatgtatctga

SEQ ID NO: 17876 - DNA, 18 bp, Artificial Sequence
  Target B2M Sequence complement
atgtttgatgtatctgag

SEQ ID NO: 17877 - DNA, 18 bp, Artificial Sequence
  Target B2M Sequence complement
tgtttgatgtatctgagc

SEQ ID NO: 17878 - DNA, 18 bp, Artificial Sequence
  Target B2M Sequence complement
gtttgatgtatctgagca

SEQ ID NO: 17879 - DNA, 18 bp, Artificial Sequence
  Target B2M Sequence complement
tttgatgtatctgagcag

SEQ ID NO: 17880 - DNA, 18 bp, Artificial Sequence
  Target B2M Sequence complement
ttgatgtatctgagcagg

SEQ ID NO: 17881 - DNA, 18 bp, Artificial Sequence
  Target B2M Sequence complement
tgatgtatctgagcaggt

SEQ ID NO: 17882 - DNA, 18 bp, Artificial Sequence
  Target B2M Sequence complement
gatgtatctgagcaggtt

SEQ ID NO: 17883 - DNA, 18 bp, Artificial Sequence
  Target B2M Sequence complement
atgtatctgagcaggttg

SEQ ID NO: 17884 - DNA, 18 bp, Artificial Sequence
  Target B2M Sequence complement
tgtatctgagcaggttgc

SEQ ID NO: 17885 - DNA, 18 bp, Artificial Sequence
  Target B2M Sequence complement
gtatctgagcaggttgct

SEQ ID NO: 17886 - DNA, 18 bp, Artificial Sequence
  Target B2M Sequence complement
tatctgagcaggttgctc

SEQ ID NO: 17887 - DNA, 18 bp, Artificial Sequence
  Target B2M Sequence complement
atctgagcaggttgctcc

SEQ ID NO: 17888 - DNA, 18 bp, Artificial Sequence
  Target B2M Sequence complement
tctgagcaggttgctcca

SEQ ID NO: 17889 - DNA, 18 bp, Artificial Sequence
  Target B2M Sequence complement
tgagcaggttgctccaca

SEQ ID NO: 17890 - DNA, 18 bp, Artificial Sequence
  Target B2M Sequence complement
caggttgctccacaggta

SEQ ID NO: 17891 - DNA, 18 bp, Artificial Sequence
  Target B2M Sequence complement
aggttgctccacaggtag

SEQ ID NO: 17892 - DNA, 18 bp, Artificial Sequence
  Target B2M Sequence complement
gttgctccacaggtagct

SEQ ID NO: 17893 - DNA, 18 bp, Artificial Sequence
  Target B2M Sequence complement
ttgctccacaggtagctc

SEQ ID NO: 17894 - DNA, 18 bp, Artificial Sequence
  Target B2M Sequence complement
tgctccacaggtagctct

SEQ ID NO: 17895 - DNA, 18 bp, Artificial Sequence
  Target B2M Sequence complement
gctccacaggtagctcta

SEQ ID NO: 17896 - DNA, 18 bp, Artificial Sequence
  Target B2M Sequence complement
ctccacaggtagctctag

SEQ ID NO: 17897 - DNA, 18 bp, Artificial Sequence
  Target B2M Sequence complement
tccacaggtagctctagg

SEQ ID NO: 17898 - DNA, 18 bp, Artificial Sequence
  Target B2M Sequence complement
ccacaggtagctctagga

SEQ ID NO: 17899 - DNA, 18 bp, Artificial Sequence
  Target B2M Sequence complement
cacaggtagctctaggag

SEQ ID NO: 17900 - DNA, 18 bp, Artificial Sequence
  Target B2M Sequence complement
acaggtagctctaggagg

SEQ ID NO: 17901 - DNA, 18 bp, Artificial Sequence
  Target B2M Sequence complement
taggagggctggcaactt

SEQ ID NO: 17902 - DNA, 18 bp, Artificial Sequence
  Target B2M Sequence complement
aggagggctggcaactta

SEQ ID NO: 17903 - DNA, 18 bp, Artificial Sequence
  Target B2M Sequence complement
gagggctggcaacttaga

SEQ ID NO: 17904 - DNA, 18 bp, Artificial Sequence
  Target B2M Sequence complement
agggctggcaacttagag

SEQ ID NO: 17905 - DNA, 18 bp, Artificial Sequence
  Target B2M Sequence complement
ggctggcaacttagaggt

SEQ ID NO: 17906 - DNA, 18 bp, Artificial Sequence
  Target B2M Sequence complement
gctggcaacttagaggtg

SEQ ID NO: 17907 - DNA, 18 bp, Artificial Sequence
  Target B2M Sequence complement
ctggcaacttagaggtgg

SEQ ID NO: 17908 - DNA, 18 bp, Artificial Sequence
  Target B2M Sequence complement
tggcaacttagaggtggg

SEQ ID NO: 17909 - DNA, 18 bp, Artificial Sequence
  Target B2M Sequence complement
gggagcagagaattctct

SEQ ID NO: 17910 - DNA, 18 bp, Artificial Sequence
  Target B2M Sequence complement
ggagcagagaattctctt

SEQ ID NO: 17911 - DNA, 18 bp, Artificial Sequence
  Target B2M Sequence complement
gagcagagaattctctta

SEQ ID NO: 17912 - DNA, 18 bp, Artificial Sequence
  Target B2M Sequence complement
agcagagaattctcttat

SEQ ID NO: 17913 - DNA, 18 bp, Artificial Sequence
  Target B2M Sequence complement
gcagagaattctcttatc

SEQ ID NO: 17914 - DNA, 18 bp, Artificial Sequence
  Target B2M Sequence complement
cagagaattctcttatcc

SEQ ID NO: 17915 - DNA, 18 bp, Artificial Sequence
  Target B2M Sequence complement
agagaattctcttatcca

SEQ ID NO: 17916 - DNA, 18 bp, Artificial Sequence
  Target B2M Sequence complement
gagaattctcttatccaa

SEQ ID NO: 17917 - DNA, 18 bp, Artificial Sequence
  Target B2M Sequence complement
agaattctcttatccaac

SEQ ID NO: 17918 - DNA, 18 bp, Artificial Sequence
  Target B2M Sequence complement
gaattctcttatccaaca

SEQ ID NO: 17919 - DNA, 18 bp, Artificial Sequence
  Target B2M Sequence complement
aattctcttatccaacat

SEQ ID NO: 17920 - DNA, 18 bp, Artificial Sequence
  Target B2M Sequence complement
attctcttatccaacatc

SEQ ID NO: 17921 - DNA, 18 bp, Artificial Sequence
  Target B2M Sequence complement
ttctcttatccaacatca

SEQ ID NO: 17922 - DNA, 18 bp, Artificial Sequence
  Target B2M Sequence complement
tctcttatccaacatcaa

SEQ ID NO: 17923 - DNA, 18 bp, Artificial Sequence
  Target B2M Sequence complement
ctcttatccaacatcaac

SEQ ID NO: 17924 - DNA, 18 bp, Artificial Sequence
  Target B2M Sequence complement
tcttatccaacatcaaca

SEQ ID NO: 17925 - DNA, 18 bp, Artificial Sequence
  Target B2M Sequence complement
cttatccaacatcaacat

SEQ ID NO: 17926 - DNA, 18 bp, Artificial Sequence
  Target B2M Sequence complement
ttatccaacatcaacatc

SEQ ID NO: 17927 - DNA, 18 bp, Artificial Sequence
  Target B2M Sequence complement
tatccaacatcaacatct

SEQ ID NO: 17928 - DNA, 18 bp, Artificial Sequence
  Target B2M Sequence complement
atccaacatcaacatctt

SEQ ID NO: 17929 - DNA, 18 bp, Artificial Sequence
  Target B2M Sequence complement
tccaacatcaacatcttg

SEQ ID NO: 17930 - DNA, 18 bp, Artificial Sequence
  Target B2M Sequence complement
ccaacatcaacatcttgg

SEQ ID NO: 17931 - DNA, 18 bp, Artificial Sequence
  Target B2M Sequence complement
caacatcaacatcttggt

SEQ ID NO: 17932 - DNA, 18 bp, Artificial Sequence
  Target B2M Sequence complement
aacatcaacatcttggtc

SEQ ID NO: 17933 - DNA, 18 bp, Artificial Sequence
  Target B2M Sequence complement
acatcaacatcttggtca

SEQ ID NO: 17934 - DNA, 18 bp, Artificial Sequence
  Target B2M Sequence complement
catcaacatcttggtcag

SEQ ID NO: 17935 - DNA, 18 bp, Artificial Sequence
  Target B2M Sequence complement
atcaacatcttggtcaga

SEQ ID NO: 17936 - DNA, 18 bp, Artificial Sequence
  Target B2M Sequence complement
tcaacatcttggtcagat

SEQ ID NO: 17937 - DNA, 18 bp, Artificial Sequence
  Target B2M Sequence complement
caacatcttggtcagatt

SEQ ID NO: 17938 - DNA, 18 bp, Artificial Sequence
  Target B2M Sequence complement
aacatcttggtcagattt

SEQ ID NO: 17939 - DNA, 18 bp, Artificial Sequence
  Target B2M Sequence complement
acatcttggtcagatttg

SEQ ID NO: 17940 - DNA, 18 bp, Artificial Sequence
  Target B2M Sequence complement
catcttggtcagatttga

SEQ ID NO: 17941 - DNA, 18 bp, Artificial Sequence
  Target B2M Sequence complement
atcttggtcagatttgaa

SEQ ID NO: 17942 - DNA, 18 bp, Artificial Sequence
  Target B2M Sequence complement
tcttggtcagatttgaac

SEQ ID NO: 17943 - DNA, 18 bp, Artificial Sequence
  Target B2M Sequence complement
cttggtcagatttgaact

SEQ ID NO: 17944 - DNA, 18 bp, Artificial Sequence
  Target B2M Sequence complement
ttggtcagatttgaactc

SEQ ID NO: 17945 - DNA, 18 bp, Artificial Sequence
  Target B2M Sequence complement
tggtcagatttgaactct

SEQ ID NO: 17946 - DNA, 18 bp, Artificial Sequence
  Target B2M Sequence complement
ggtcagatttgaactctt

SEQ ID NO: 17947 - DNA, 18 bp, Artificial Sequence
  Target B2M Sequence complement
gtcagatttgaactcttc

SEQ ID NO: 17948 - DNA, 18 bp, Artificial Sequence
  Target B2M Sequence complement
tcagatttgaactcttca

SEQ ID NO: 17949 - DNA, 18 bp, Artificial Sequence
  Target B2M Sequence complement
cagatttgaactcttcaa

SEQ ID NO: 17950 - DNA, 18 bp, Artificial Sequence
  Target B2M Sequence complement
agatttgaactcttcaat

SEQ ID NO: 17951 - DNA, 18 bp, Artificial Sequence
  Target B2M Sequence complement
gatttgaactcttcaatc

SEQ ID NO: 17952 - DNA, 18 bp, Artificial Sequence
  Target B2M Sequence complement
atttgaactcttcaatct

SEQ ID NO: 17953 - DNA, 18 bp, Artificial Sequence
  Target B2M Sequence complement
tttgaactcttcaatctc

SEQ ID NO: 17954 - DNA, 18 bp, Artificial Sequence
  Target B2M Sequence complement
ttgaactcttcaatctct

SEQ ID NO: 17955 - DNA, 18 bp, Artificial Sequence
  Target B2M Sequence complement
tgaactcttcaatctctt

SEQ ID NO: 17956 - DNA, 18 bp, Artificial Sequence
  Target B2M Sequence complement
gaactcttcaatctcttg

SEQ ID NO: 17957 - DNA, 18 bp, Artificial Sequence
  Target B2M Sequence complement
aactcttcaatctcttgc

SEQ ID NO: 17958 - DNA, 18 bp, Artificial Sequence
  Target B2M Sequence complement
actcttcaatctcttgca

SEQ ID NO: 17959 - DNA, 18 bp, Artificial Sequence
  Target B2M Sequence complement
ctcttcaatctcttgcac

SEQ ID NO: 17960 - DNA, 18 bp, Artificial Sequence
  Target B2M Sequence complement
tcttcaatctcttgcact

SEQ ID NO: 17961 - DNA, 18 bp, Artificial Sequence
  Target B2M Sequence complement
cttcaatctcttgcactc

SEQ ID NO: 17962 - DNA, 18 bp, Artificial Sequence
  Target B2M Sequence complement
ttcaatctcttgcactca

SEQ ID NO: 17963 - DNA, 18 bp, Artificial Sequence
  Target B2M Sequence complement
tcaatctcttgcactcaa

SEQ ID NO: 17964 - DNA, 18 bp, Artificial Sequence
  Target B2M Sequence complement
caatctcttgcactcaaa

SEQ ID NO: 17965 - DNA, 18 bp, Artificial Sequence
  Target B2M Sequence complement
aatctcttgcactcaaag

SEQ ID NO: 17966 - DNA, 18 bp, Artificial Sequence
  Target B2M Sequence complement
atctcttgcactcaaagc

SEQ ID NO: 17967 - DNA, 18 bp, Artificial Sequence
  Target B2M Sequence complement
tctcttgcactcaaagct

SEQ ID NO: 17968 - DNA, 18 bp, Artificial Sequence
  Target B2M Sequence complement
ctcttgcactcaaagctt

SEQ ID NO: 17969 - DNA, 18 bp, Artificial Sequence
  Target B2M Sequence complement
tcttgcactcaaagcttg

SEQ ID NO: 17970 - DNA, 18 bp, Artificial Sequence
  Target B2M Sequence complement
cttgcactcaaagcttgt

SEQ ID NO: 17971 - DNA, 18 bp, Artificial Sequence
  Target B2M Sequence complement
ttgcactcaaagcttgtt

SEQ ID NO: 17972 - DNA, 18 bp, Artificial Sequence
  Target B2M Sequence complement
tgcactcaaagcttgtta

SEQ ID NO: 17973 - DNA, 18 bp, Artificial Sequence
  Target B2M Sequence complement
gcactcaaagcttgttaa

SEQ ID NO: 17974 - DNA, 18 bp, Artificial Sequence
  Target B2M Sequence complement
cactcaaagcttgttaag

SEQ ID NO: 17975 - DNA, 18 bp, Artificial Sequence
  Target B2M Sequence complement
actcaaagcttgttaaga

SEQ ID NO: 17976 - DNA, 18 bp, Artificial Sequence
  Target B2M Sequence complement
ctcaaagcttgttaagat

SEQ ID NO: 17977 - DNA, 18 bp, Artificial Sequence
  Target B2M Sequence complement
tcaaagcttgttaagata

SEQ ID NO: 17978 - DNA, 18 bp, Artificial Sequence
  Target B2M Sequence complement
caaagcttgttaagatag

SEQ ID NO: 17979 - DNA, 18 bp, Artificial Sequence
  Target B2M Sequence complement
aaagcttgttaagatagt

SEQ ID NO: 17980 - DNA, 18 bp, Artificial Sequence
  Target B2M Sequence complement
aagcttgttaagatagtt

SEQ ID NO: 17981 - DNA, 18 bp, Artificial Sequence
  Target B2M Sequence complement
agcttgttaagatagtta

SEQ ID NO: 17982 - DNA, 18 bp, Artificial Sequence
  Target B2M Sequence complement
gcttgttaagatagttaa

SEQ ID NO: 17983 - DNA, 18 bp, Artificial Sequence
  Target B2M Sequence complement
cttgttaagatagttaag

SEQ ID NO: 17984 - DNA, 18 bp, Artificial Sequence
  Target B2M Sequence complement
ttgttaagatagttaagc

SEQ ID NO: 17985 - DNA, 18 bp, Artificial Sequence
  Target B2M Sequence complement
tgttaagatagttaagcg

SEQ ID NO: 17986 - DNA, 18 bp, Artificial Sequence
  Target B2M Sequence complement
gttaagatagttaagcgt

SEQ ID NO: 17987 - DNA, 18 bp, Artificial Sequence
  Target B2M Sequence complement
ttaagatagttaagcgtg

SEQ ID NO: 17988 - DNA, 18 bp, Artificial Sequence
  Target B2M Sequence complement
taagatagttaagcgtgc

SEQ ID NO: 17989 - DNA, 18 bp, Artificial Sequence
  Target B2M Sequence complement
aagatagttaagcgtgca

SEQ ID NO: 17990 - DNA, 18 bp, Artificial Sequence
  Target B2M Sequence complement
agatagttaagcgtgcat

SEQ ID NO: 17991 - DNA, 18 bp, Artificial Sequence
  Target B2M Sequence complement
gatagttaagcgtgcata

SEQ ID NO: 17992 - DNA, 18 bp, Artificial Sequence
  Target B2M Sequence complement
atagttaagcgtgcataa

SEQ ID NO: 17993 - DNA, 18 bp, Artificial Sequence
  Target B2M Sequence complement
tagttaagcgtgcataag

SEQ ID NO: 17994 - DNA, 18 bp, Artificial Sequence
  Target B2M Sequence complement
agttaagcgtgcataagt

SEQ ID NO: 17995 - DNA, 18 bp, Artificial Sequence
  Target B2M Sequence complement
gttaagcgtgcataagtt

SEQ ID NO: 17996 - DNA, 18 bp, Artificial Sequence
  Target B2M Sequence complement
ttaagcgtgcataagtta

SEQ ID NO: 17997 - DNA, 18 bp, Artificial Sequence
  Target B2M Sequence complement
taagcgtgcataagttaa

SEQ ID NO: 17998 - DNA, 18 bp, Artificial Sequence
  Target B2M Sequence complement
aagcgtgcataagttaac

SEQ ID NO: 17999 - DNA, 18 bp, Artificial Sequence
  Target B2M Sequence complement
agcgtgcataagttaact

SEQ ID NO: 18000 - DNA, 18 bp, Artificial Sequence
  Target B2M Sequence complement
gcgtgcataagttaactt

SEQ ID NO: 18001 - DNA, 18 bp, Artificial Sequence
  Target B2M Sequence complement
cgtgcataagttaacttc

SEQ ID NO: 18002 - DNA, 18 bp, Artificial Sequence
  Target B2M Sequence complement
gtgcataagttaacttcc

SEQ ID NO: 18003 - DNA, 18 bp, Artificial Sequence
  Target B2M Sequence complement
tgcataagttaacttcca

SEQ ID NO: 18004 - DNA, 18 bp, Artificial Sequence
  Target B2M Sequence complement
gcataagttaacttccaa

SEQ ID NO: 18005 - DNA, 18 bp, Artificial Sequence
  Target B2M Sequence complement
cataagttaacttccaat

SEQ ID NO: 18006 - DNA, 18 bp, Artificial Sequence
  Target B2M Sequence complement
agttaacttccaatttac

SEQ ID NO: 18007 - DNA, 18 bp, Artificial Sequence
  Target B2M Sequence complement
gttaacttccaatttaca

SEQ ID NO: 18008 - DNA, 18 bp, Artificial Sequence
  Target B2M Sequence complement
aacttccaatttacatac

SEQ ID NO: 18009 - DNA, 18 bp, Artificial Sequence
  Target B2M Sequence complement
acttccaatttacatact

SEQ ID NO: 18010 - DNA, 18 bp, Artificial Sequence
  Target B2M Sequence complement
cttccaatttacatactc

SEQ ID NO: 18011 - DNA, 18 bp, Artificial Sequence
  Target B2M Sequence complement
ttccaatttacatactct

SEQ ID NO: 18012 - DNA, 18 bp, Artificial Sequence
  Target B2M Sequence complement
tccaatttacatactctg

SEQ ID NO: 18013 - DNA, 18 bp, Artificial Sequence
  Target B2M Sequence complement
ccaatttacatactctgc

SEQ ID NO: 18014 - DNA, 18 bp, Artificial Sequence
  Target B2M Sequence complement
caatttacatactctgct

SEQ ID NO: 18015 - DNA, 18 bp, Artificial Sequence
  Target B2M Sequence complement
aatttacatactctgctt

SEQ ID NO: 18016 - DNA, 18 bp, Artificial Sequence
  Target B2M Sequence complement
atttacatactctgctta

SEQ ID NO: 18017 - DNA, 18 bp, Artificial Sequence
  Target B2M Sequence complement
tttacatactctgcttag

SEQ ID NO: 18018 - DNA, 18 bp, Artificial Sequence
  Target B2M Sequence complement
ttacatactctgcttaga

SEQ ID NO: 18019 - DNA, 18 bp, Artificial Sequence
  Target B2M Sequence complement
tacatactctgcttagaa

SEQ ID NO: 18020 - DNA, 18 bp, Artificial Sequence
  Target B2M Sequence complement
acatactctgcttagaat

SEQ ID NO: 18021 - DNA, 18 bp, Artificial Sequence
  Target B2M Sequence complement
catactctgcttagaatt

SEQ ID NO: 18022 - DNA, 18 bp, Artificial Sequence
  Target B2M Sequence complement
atactctgcttagaattt

SEQ ID NO: 18023 - DNA, 18 bp, Artificial Sequence
  Target B2M Sequence complement
tactctgcttagaatttg

SEQ ID NO: 18024 - DNA, 18 bp, Artificial Sequence
  Target B2M Sequence complement
actctgcttagaatttgg

SEQ ID NO: 18025 - DNA, 18 bp, Artificial Sequence
  Target B2M Sequence complement
ctctgcttagaatttggg

SEQ ID NO: 18026 - DNA, 18 bp, Artificial Sequence
  Target B2M Sequence complement
agaaatataattgacagg

SEQ ID NO: 18027 - DNA, 18 bp, Artificial Sequence
  Target B2M Sequence complement
gaaatataattgacagga

SEQ ID NO: 18028 - DNA, 18 bp, Artificial Sequence
  Target B2M Sequence complement
taattgacaggattattg

SEQ ID NO: 18029 - DNA, 18 bp, Artificial Sequence
  Target B2M Sequence complement
aattgacaggattattgg

SEQ ID NO: 18030 - DNA, 18 bp, Artificial Sequence
  Target B2M Sequence complement
attgacaggattattgga

SEQ ID NO: 18031 - DNA, 18 bp, Artificial Sequence
  Target B2M Sequence complement
ttgacaggattattggaa

SEQ ID NO: 18032 - DNA, 18 bp, Artificial Sequence
  Target B2M Sequence complement
tgacaggattattggaaa

SEQ ID NO: 18033 - DNA, 18 bp, Artificial Sequence
  Target B2M Sequence complement
gacaggattattggaaat

SEQ ID NO: 18034 - DNA, 18 bp, Artificial Sequence
  Target B2M Sequence complement
acaggattattggaaatt

SEQ ID NO: 18035 - DNA, 18 bp, Artificial Sequence
  Target B2M Sequence complement
caggattattggaaattt

SEQ ID NO: 18036 - DNA, 18 bp, Artificial Sequence
  Target B2M Sequence complement
aggattattggaaatttg

SEQ ID NO: 18037 - DNA, 18 bp, Artificial Sequence
  Target B2M Sequence complement
ggattattggaaatttgt

SEQ ID NO: 18038 - DNA, 18 bp, Artificial Sequence
  Target B2M Sequence complement
acatttgataaagtaagg

SEQ ID NO: 18039 - DNA, 18 bp, Artificial Sequence
  Target B2M Sequence complement
catttgataaagtaaggc

SEQ ID NO: 18040 - DNA, 18 bp, Artificial Sequence
  Target B2M Sequence complement
atttgataaagtaaggca

SEQ ID NO: 18041 - DNA, 18 bp, Artificial Sequence
  Target B2M Sequence complement
tttgataaagtaaggcat

SEQ ID NO: 18042 - DNA, 18 bp, Artificial Sequence
  Target B2M Sequence complement
ttgataaagtaaggcatg

SEQ ID NO: 18043 - DNA, 18 bp, Artificial Sequence
  Target B2M Sequence complement
tgataaagtaaggcatgg

SEQ ID NO: 18044 - DNA, 18 bp, Artificial Sequence
  Target B2M Sequence complement
gataaagtaaggcatggt

SEQ ID NO: 18045 - DNA, 18 bp, Artificial Sequence
  Target B2M Sequence complement
ataaagtaaggcatggtt

SEQ ID NO: 18046 - DNA, 18 bp, Artificial Sequence
  Target B2M Sequence complement
taaagtaaggcatggttg

SEQ ID NO: 18047 - DNA, 18 bp, Artificial Sequence
  Target B2M Sequence complement
aaagtaaggcatggttgt

SEQ ID NO: 18048 - DNA, 18 bp, Artificial Sequence
  Target B2M Sequence complement
aagtaaggcatggttgtg

SEQ ID NO: 18049 - DNA, 18 bp, Artificial Sequence
  Target B2M Sequence complement
agtaaggcatggttgtgg

SEQ ID NO: 18050 - DNA, 18 bp, Artificial Sequence
  Target B2M Sequence complement
gtaaggcatggttgtggt

SEQ ID NO: 18051 - DNA, 18 bp, Artificial Sequence
  Target B2M Sequence complement
taaggcatggttgtggtt

SEQ ID NO: 18052 - DNA, 18 bp, Artificial Sequence
  Target B2M Sequence complement
aaggcatggttgtggtta

SEQ ID NO: 18053 - DNA, 18 bp, Artificial Sequence
  Target B2M Sequence complement
aggcatggttgtggttaa

SEQ ID NO: 18054 - DNA, 18 bp, Artificial Sequence
  Target B2M Sequence complement
ggcatggttgtggttaat

SEQ ID NO: 18055 - DNA, 18 bp, Artificial Sequence
  Target B2M Sequence complement
gcatggttgtggttaatc

SEQ ID NO: 18056 - DNA, 18 bp, Artificial Sequence
  Target B2M Sequence complement
catggttgtggttaatct

SEQ ID NO: 18057 - DNA, 18 bp, Artificial Sequence
  Target B2M Sequence complement
atggttgtggttaatctg

SEQ ID NO: 18058 - DNA, 18 bp, Artificial Sequence
  Target B2M Sequence complement
tggttgtggttaatctgg

SEQ ID NO: 18059 - DNA, 18 bp, Artificial Sequence
  Target B2M Sequence complement
ggttgtggttaatctggt

SEQ ID NO: 18060 - DNA, 18 bp, Artificial Sequence
  Target B2M Sequence complement
gttgtggttaatctggtt

SEQ ID NO: 18061 - DNA, 18 bp, Artificial Sequence
  Target B2M Sequence complement
ttgtggttaatctggttt

SEQ ID NO: 18062 - DNA, 18 bp, Artificial Sequence
  Target B2M Sequence complement
tgtggttaatctggttta

SEQ ID NO: 18063 - DNA, 18 bp, Artificial Sequence
  Target B2M Sequence complement
gtggttaatctggtttat

SEQ ID NO: 18064 - DNA, 18 bp, Artificial Sequence
  Target B2M Sequence complement
tggttaatctggtttatt

SEQ ID NO: 18065 - DNA, 18 bp, Artificial Sequence
  Target B2M Sequence complement
ggttaatctggtttattt

SEQ ID NO: 18066 - DNA, 18 bp, Artificial Sequence
  Target B2M Sequence complement
tttgttccacaagttaaa

SEQ ID NO: 18067 - DNA, 18 bp, Artificial Sequence
  Target B2M Sequence complement
ttgttccacaagttaaat

SEQ ID NO: 18068 - DNA, 18 bp, Artificial Sequence
  Target B2M Sequence complement
tgttccacaagttaaata

SEQ ID NO: 18069 - DNA, 18 bp, Artificial Sequence
  Target B2M Sequence complement
gttccacaagttaaataa

SEQ ID NO: 18070 - DNA, 18 bp, Artificial Sequence
  Target B2M Sequence complement
ccacaagttaaataaatc

SEQ ID NO: 18071 - DNA, 19 bp, Artificial Sequence
  Target B2M Sequence complement
attcctgaagctgacagca

SEQ ID NO: 18072 - DNA, 19 bp, Artificial Sequence
  Target B2M Sequence complement
ttcctgaagctgacagcat

SEQ ID NO: 18073 - DNA, 19 bp, Artificial Sequence
  Target B2M Sequence complement
tcctgaagctgacagcatt

SEQ ID NO: 18074 - DNA, 19 bp, Artificial Sequence
  Target B2M Sequence complement
cctgaagctgacagcattc

SEQ ID NO: 18075 - DNA, 19 bp, Artificial Sequence
  Target B2M Sequence complement
ctgaagctgacagcattcg

SEQ ID NO: 18076 - DNA, 19 bp, Artificial Sequence
  Target B2M Sequence complement
tgaagctgacagcattcgg

SEQ ID NO: 18077 - DNA, 19 bp, Artificial Sequence
  Target B2M Sequence complement
gaagctgacagcattcggg

SEQ ID NO: 18078 - DNA, 19 bp, Artificial Sequence
  Target B2M Sequence complement
aagctgacagcattcgggc

SEQ ID NO: 18079 - DNA, 19 bp, Artificial Sequence
  Target B2M Sequence complement
cttagctgtgctcgcgcta

SEQ ID NO: 18080 - DNA, 19 bp, Artificial Sequence
  Target B2M Sequence complement
ttagctgtgctcgcgctac

SEQ ID NO: 18081 - DNA, 19 bp, Artificial Sequence
  Target B2M Sequence complement
tagctgtgctcgcgctact

SEQ ID NO: 18082 - DNA, 19 bp, Artificial Sequence
  Target B2M Sequence complement
tgtgctcgcgctactctct

SEQ ID NO: 18083 - DNA, 19 bp, Artificial Sequence
  Target B2M Sequence complement
tgctcgcgctactctctct

SEQ ID NO: 18084 - DNA, 19 bp, Artificial Sequence
  Target B2M Sequence complement
gctcgcgctactctctctt

SEQ ID NO: 18085 - DNA, 19 bp, Artificial Sequence
  Target B2M Sequence complement
ctcgcgctactctctcttt

SEQ ID NO: 18086 - DNA, 19 bp, Artificial Sequence
  Target B2M Sequence complement
tcgcgctactctctctttc

SEQ ID NO: 18087 - DNA, 19 bp, Artificial Sequence
  Target B2M Sequence complement
cgcgctactctctctttct

SEQ ID NO: 18088 - DNA, 19 bp, Artificial Sequence
  Target B2M Sequence complement
gcgctactctctctttctg

SEQ ID NO: 18089 - DNA, 19 bp, Artificial Sequence
  Target B2M Sequence complement
cgctactctctctttctgg

SEQ ID NO: 18090 - DNA, 19 bp, Artificial Sequence
  Target B2M Sequence complement
gctactctctctttctggc

SEQ ID NO: 18091 - DNA, 19 bp, Artificial Sequence
  Target B2M Sequence complement
ctactctctctttctggcc

SEQ ID NO: 18092 - DNA, 19 bp, Artificial Sequence
  Target B2M Sequence complement
tactctctctttctggcct

SEQ ID NO: 18093 - DNA, 19 bp, Artificial Sequence
  Target B2M Sequence complement
actctctctttctggcctg

SEQ ID NO: 18094 - DNA, 19 bp, Artificial Sequence
  Target B2M Sequence complement
ctctctctttctggcctgg

SEQ ID NO: 18095 - DNA, 19 bp, Artificial Sequence
  Target B2M Sequence complement
tctctctttctggcctgga

SEQ ID NO: 18096 - DNA, 19 bp, Artificial Sequence
  Target B2M Sequence complement
ctctctttctggcctggag

SEQ ID NO: 18097 - DNA, 19 bp, Artificial Sequence
  Target B2M Sequence complement
tctctttctggcctggagg

SEQ ID NO: 18098 - DNA, 19 bp, Artificial Sequence
  Target B2M Sequence complement
tctttctggcctggaggct

SEQ ID NO: 18099 - DNA, 19 bp, Artificial Sequence
  Target B2M Sequence complement
ctttctggcctggaggcta

SEQ ID NO: 18100 - DNA, 19 bp, Artificial Sequence
  Target B2M Sequence complement
tttctggcctggaggctat

SEQ ID NO: 18101 - DNA, 19 bp, Artificial Sequence
  Target B2M Sequence complement
ttctggcctggaggctatc

SEQ ID NO: 18102 - DNA, 19 bp, Artificial Sequence
  Target B2M Sequence complement
ctggaggctatccagcgta

SEQ ID NO: 18103 - DNA, 19 bp, Artificial Sequence
  Target B2M Sequence complement
tggaggctatccagcgtac

SEQ ID NO: 18104 - DNA, 19 bp, Artificial Sequence
  Target B2M Sequence complement
ggaggctatccagcgtact

SEQ ID NO: 18105 - DNA, 19 bp, Artificial Sequence
  Target B2M Sequence complement
gaggctatccagcgtactc

SEQ ID NO: 18106 - DNA, 19 bp, Artificial Sequence
  Target B2M Sequence complement
aggctatccagcgtactcc

SEQ ID NO: 18107 - DNA, 19 bp, Artificial Sequence
  Target B2M Sequence complement
ggctatccagcgtactcca

SEQ ID NO: 18108 - DNA, 19 bp, Artificial Sequence
  Target B2M Sequence complement
gctatccagcgtactccaa

SEQ ID NO: 18109 - DNA, 19 bp, Artificial Sequence
  Target B2M Sequence complement
ctatccagcgtactccaaa

SEQ ID NO: 18110 - DNA, 19 bp, Artificial Sequence
  Target B2M Sequence complement
tatccagcgtactccaaag

SEQ ID NO: 18111 - DNA, 19 bp, Artificial Sequence
  Target B2M Sequence complement
atccagcgtactccaaaga

SEQ ID NO: 18112 - DNA, 19 bp, Artificial Sequence
  Target B2M Sequence complement
tccagcgtactccaaagat

SEQ ID NO: 18113 - DNA, 19 bp, Artificial Sequence
  Target B2M Sequence complement
ccagcgtactccaaagatt

SEQ ID NO: 18114 - DNA, 19 bp, Artificial Sequence
  Target B2M Sequence complement
cagcgtactccaaagattc

SEQ ID NO: 18115 - DNA, 19 bp, Artificial Sequence
  Target B2M Sequence complement
agcgtactccaaagattca

SEQ ID NO: 18116 - DNA, 19 bp, Artificial Sequence
  Target B2M Sequence complement
gcgtactccaaagattcag

SEQ ID NO: 18117 - DNA, 19 bp, Artificial Sequence
  Target B2M Sequence complement
cgtactccaaagattcagg

SEQ ID NO: 18118 - DNA, 19 bp, Artificial Sequence
  Target B2M Sequence complement
gtactccaaagattcaggt

SEQ ID NO: 18119 - DNA, 19 bp, Artificial Sequence
  Target B2M Sequence complement
tactccaaagattcaggtt

SEQ ID NO: 18120 - DNA, 19 bp, Artificial Sequence
  Target B2M Sequence complement
actccaaagattcaggttt

SEQ ID NO: 18121 - DNA, 19 bp, Artificial Sequence
  Target B2M Sequence complement
ctccaaagattcaggttta

SEQ ID NO: 18122 - DNA, 19 bp, Artificial Sequence
  Target B2M Sequence complement
tccaaagattcaggtttac

SEQ ID NO: 18123 - DNA, 19 bp, Artificial Sequence
  Target B2M Sequence complement
ccaaagattcaggtttact

SEQ ID NO: 18124 - DNA, 19 bp, Artificial Sequence
  Target B2M Sequence complement
caaagattcaggtttactc

SEQ ID NO: 18125 - DNA, 19 bp, Artificial Sequence
  Target B2M Sequence complement
aaagattcaggtttactca

SEQ ID NO: 18126 - DNA, 19 bp, Artificial Sequence
  Target B2M Sequence complement
aagattcaggtttactcac

SEQ ID NO: 18127 - DNA, 19 bp, Artificial Sequence
  Target B2M Sequence complement
agattcaggtttactcacg

SEQ ID NO: 18128 - DNA, 19 bp, Artificial Sequence
  Target B2M Sequence complement
gattcaggtttactcacgt

SEQ ID NO: 18129 - DNA, 19 bp, Artificial Sequence
  Target B2M Sequence complement
attcaggtttactcacgtc

SEQ ID NO: 18130 - DNA, 19 bp, Artificial Sequence
  Target B2M Sequence complement
ttcaggtttactcacgtca

SEQ ID NO: 18131 - DNA, 19 bp, Artificial Sequence
  Target B2M Sequence complement
tcaggtttactcacgtcat

SEQ ID NO: 18132 - DNA, 19 bp, Artificial Sequence
  Target B2M Sequence complement
caggtttactcacgtcatc

SEQ ID NO: 18133 - DNA, 19 bp, Artificial Sequence
  Target B2M Sequence complement
aggtttactcacgtcatcc

SEQ ID NO: 18134 - DNA, 19 bp, Artificial Sequence
  Target B2M Sequence complement
ggtttactcacgtcatcca

SEQ ID NO: 18135 - DNA, 19 bp, Artificial Sequence
  Target B2M Sequence complement
gtttactcacgtcatccag

SEQ ID NO: 18136 - DNA, 19 bp, Artificial Sequence
  Target B2M Sequence complement
tttactcacgtcatccagc

SEQ ID NO: 18137 - DNA, 19 bp, Artificial Sequence
  Target B2M Sequence complement
ttactcacgtcatccagca

SEQ ID NO: 18138 - DNA, 19 bp, Artificial Sequence
  Target B2M Sequence complement
tactcacgtcatccagcag

SEQ ID NO: 18139 - DNA, 19 bp, Artificial Sequence
  Target B2M Sequence complement
actcacgtcatccagcaga

SEQ ID NO: 18140 - DNA, 19 bp, Artificial Sequence
  Target B2M Sequence complement
ctcacgtcatccagcagag

SEQ ID NO: 18141 - DNA, 19 bp, Artificial Sequence
  Target B2M Sequence complement
tcacgtcatccagcagaga

SEQ ID NO: 18142 - DNA, 19 bp, Artificial Sequence
  Target B2M Sequence complement
cacgtcatccagcagagaa

SEQ ID NO: 18143 - DNA, 19 bp, Artificial Sequence
  Target B2M Sequence complement
acgtcatccagcagagaat

SEQ ID NO: 18144 - DNA, 19 bp, Artificial Sequence
  Target B2M Sequence complement
cgtcatccagcagagaatg

SEQ ID NO: 18145 - DNA, 19 bp, Artificial Sequence
  Target B2M Sequence complement
gtcatccagcagagaatgg

SEQ ID NO: 18146 - DNA, 19 bp, Artificial Sequence
  Target B2M Sequence complement
tcatccagcagagaatgga

SEQ ID NO: 18147 - DNA, 19 bp, Artificial Sequence
  Target B2M Sequence complement
catccagcagagaatggaa

SEQ ID NO: 18148 - DNA, 19 bp, Artificial Sequence
  Target B2M Sequence complement
atccagcagagaatggaaa

SEQ ID NO: 18149 - DNA, 19 bp, Artificial Sequence
  Target B2M Sequence complement
tccagcagagaatggaaag

SEQ ID NO: 18150 - DNA, 19 bp, Artificial Sequence
  Target B2M Sequence complement
ccagcagagaatggaaagt

SEQ ID NO: 18151 - DNA, 19 bp, Artificial Sequence
  Target B2M Sequence complement
cagcagagaatggaaagtc

SEQ ID NO: 18152 - DNA, 19 bp, Artificial Sequence
  Target B2M Sequence complement
agcagagaatggaaagtca

SEQ ID NO: 18153 - DNA, 19 bp, Artificial Sequence
  Target B2M Sequence complement
gcagagaatggaaagtcaa

SEQ ID NO: 18154 - DNA, 19 bp, Artificial Sequence
  Target B2M Sequence complement
cagagaatggaaagtcaaa

SEQ ID NO: 18155 - DNA, 19 bp, Artificial Sequence
  Target B2M Sequence complement
agagaatggaaagtcaaat

SEQ ID NO: 18156 - DNA, 19 bp, Artificial Sequence
  Target B2M Sequence complement
gagaatggaaagtcaaatt

SEQ ID NO: 18157 - DNA, 19 bp, Artificial Sequence
  Target B2M Sequence complement
agaatggaaagtcaaattt

SEQ ID NO: 18158 - DNA, 19 bp, Artificial Sequence
  Target B2M Sequence complement
gaatggaaagtcaaatttc

SEQ ID NO: 18159 - DNA, 19 bp, Artificial Sequence
  Target B2M Sequence complement
aatggaaagtcaaatttcc

SEQ ID NO: 18160 - DNA, 19 bp, Artificial Sequence
  Target B2M Sequence complement
atggaaagtcaaatttcct

SEQ ID NO: 18161 - DNA, 19 bp, Artificial Sequence
  Target B2M Sequence complement
tggaaagtcaaatttcctg

SEQ ID NO: 18162 - DNA, 19 bp, Artificial Sequence
  Target B2M Sequence complement
ggaaagtcaaatttcctga

SEQ ID NO: 18163 - DNA, 19 bp, Artificial Sequence
  Target B2M Sequence complement
gaaagtcaaatttcctgaa

SEQ ID NO: 18164 - DNA, 19 bp, Artificial Sequence
  Target B2M Sequence complement
aaagtcaaatttcctgaat

SEQ ID NO: 18165 - DNA, 19 bp, Artificial Sequence
  Target B2M Sequence complement
aagtcaaatttcctgaatt

SEQ ID NO: 18166 - DNA, 19 bp, Artificial Sequence
  Target B2M Sequence complement
agtcaaatttcctgaattg

SEQ ID NO: 18167 - DNA, 19 bp, Artificial Sequence
  Target B2M Sequence complement
gtcaaatttcctgaattgc

SEQ ID NO: 18168 - DNA, 19 bp, Artificial Sequence
  Target B2M Sequence complement
tcaaatttcctgaattgct

SEQ ID NO: 18169 - DNA, 19 bp, Artificial Sequence
  Target B2M Sequence complement
caaatttcctgaattgcta

SEQ ID NO: 18170 - DNA, 19 bp, Artificial Sequence
  Target B2M Sequence complement
aaatttcctgaattgctat

SEQ ID NO: 18171 - DNA, 19 bp, Artificial Sequence
  Target B2M Sequence complement
aatttcctgaattgctatg

SEQ ID NO: 18172 - DNA, 19 bp, Artificial Sequence
  Target B2M Sequence complement
atttcctgaattgctatgt

SEQ ID NO: 18173 - DNA, 19 bp, Artificial Sequence
  Target B2M Sequence complement
tttcctgaattgctatgtg

SEQ ID NO: 18174 - DNA, 19 bp, Artificial Sequence
  Target B2M Sequence complement
ttcctgaattgctatgtgt

SEQ ID NO: 18175 - DNA, 19 bp, Artificial Sequence
  Target B2M Sequence complement
tcctgaattgctatgtgtc

SEQ ID NO: 18176 - DNA, 19 bp, Artificial Sequence
  Target B2M Sequence complement
cctgaattgctatgtgtct

SEQ ID NO: 18177 - DNA, 19 bp, Artificial Sequence
  Target B2M Sequence complement
ctgaattgctatgtgtctg

SEQ ID NO: 18178 - DNA, 19 bp, Artificial Sequence
  Target B2M Sequence complement
tgaattgctatgtgtctgg

SEQ ID NO: 18179 - DNA, 19 bp, Artificial Sequence
  Target B2M Sequence complement
gaattgctatgtgtctggg

SEQ ID NO: 18180 - DNA, 19 bp, Artificial Sequence
  Target B2M Sequence complement
aattgctatgtgtctgggt

SEQ ID NO: 18181 - DNA, 19 bp, Artificial Sequence
  Target B2M Sequence complement
attgctatgtgtctgggtt

SEQ ID NO: 18182 - DNA, 19 bp, Artificial Sequence
  Target B2M Sequence complement
ttgctatgtgtctgggttt

SEQ ID NO: 18183 - DNA, 19 bp, Artificial Sequence
  Target B2M Sequence complement
tgctatgtgtctgggtttc

SEQ ID NO: 18184 - DNA, 19 bp, Artificial Sequence
  Target B2M Sequence complement
gctatgtgtctgggtttca

SEQ ID NO: 18185 - DNA, 19 bp, Artificial Sequence
  Target B2M Sequence complement
ctatgtgtctgggtttcat

SEQ ID NO: 18186 - DNA, 19 bp, Artificial Sequence
  Target B2M Sequence complement
tatgtgtctgggtttcatc

SEQ ID NO: 18187 - DNA, 19 bp, Artificial Sequence
  Target B2M Sequence complement
atgtgtctgggtttcatcc

SEQ ID NO: 18188 - DNA, 19 bp, Artificial Sequence
  Target B2M Sequence complement
tgtgtctgggtttcatcca

SEQ ID NO: 18189 - DNA, 19 bp, Artificial Sequence
  Target B2M Sequence complement
gtgtctgggtttcatccat

SEQ ID NO: 18190 - DNA, 19 bp, Artificial Sequence
  Target B2M Sequence complement
tgtctgggtttcatccatc

SEQ ID NO: 18191 - DNA, 19 bp, Artificial Sequence
  Target B2M Sequence complement
gtctgggtttcatccatcc

SEQ ID NO: 18192 - DNA, 19 bp, Artificial Sequence
  Target B2M Sequence complement
tctgggtttcatccatccg

SEQ ID NO: 18193 - DNA, 19 bp, Artificial Sequence
  Target B2M Sequence complement
ctgggtttcatccatccga

SEQ ID NO: 18194 - DNA, 19 bp, Artificial Sequence
  Target B2M Sequence complement
tgggtttcatccatccgac

SEQ ID NO: 18195 - DNA, 19 bp, Artificial Sequence
  Target B2M Sequence complement
gggtttcatccatccgaca

SEQ ID NO: 18196 - DNA, 19 bp, Artificial Sequence
  Target B2M Sequence complement
ggtttcatccatccgacat

SEQ ID NO: 18197 - DNA, 19 bp, Artificial Sequence
  Target B2M Sequence complement
gtttcatccatccgacatt

SEQ ID NO: 18198 - DNA, 19 bp, Artificial Sequence
  Target B2M Sequence complement
tttcatccatccgacattg

SEQ ID NO: 18199 - DNA, 19 bp, Artificial Sequence
  Target B2M Sequence complement
ttcatccatccgacattga

SEQ ID NO: 18200 - DNA, 19 bp, Artificial Sequence
  Target B2M Sequence complement
tcatccatccgacattgaa

SEQ ID NO: 18201 - DNA, 19 bp, Artificial Sequence
  Target B2M Sequence complement
catccatccgacattgaag

SEQ ID NO: 18202 - DNA, 19 bp, Artificial Sequence
  Target B2M Sequence complement
atccatccgacattgaagt

SEQ ID NO: 18203 - DNA, 19 bp, Artificial Sequence
  Target B2M Sequence complement
tccatccgacattgaagtt

SEQ ID NO: 18204 - DNA, 19 bp, Artificial Sequence
  Target B2M Sequence complement
ccatccgacattgaagttg

SEQ ID NO: 18205 - DNA, 19 bp, Artificial Sequence
  Target B2M Sequence complement
catccgacattgaagttga

SEQ ID NO: 18206 - DNA, 19 bp, Artificial Sequence
  Target B2M Sequence complement
atccgacattgaagttgac

SEQ ID NO: 18207 - DNA, 19 bp, Artificial Sequence
  Target B2M Sequence complement
tccgacattgaagttgact

SEQ ID NO: 18208 - DNA, 19 bp, Artificial Sequence
  Target B2M Sequence complement
ccgacattgaagttgactt

SEQ ID NO: 18209 - DNA, 19 bp, Artificial Sequence
  Target B2M Sequence complement
cgacattgaagttgactta

SEQ ID NO: 18210 - DNA, 19 bp, Artificial Sequence
  Target B2M Sequence complement
gacattgaagttgacttac

SEQ ID NO: 18211 - DNA, 19 bp, Artificial Sequence
  Target B2M Sequence complement
acattgaagttgacttact

SEQ ID NO: 18212 - DNA, 19 bp, Artificial Sequence
  Target B2M Sequence complement
cattgaagttgacttactg

SEQ ID NO: 18213 - DNA, 19 bp, Artificial Sequence
  Target B2M Sequence complement
attgaagttgacttactga

SEQ ID NO: 18214 - DNA, 19 bp, Artificial Sequence
  Target B2M Sequence complement
ttgaagttgacttactgaa

SEQ ID NO: 18215 - DNA, 19 bp, Artificial Sequence
  Target B2M Sequence complement
tgaagttgacttactgaag

SEQ ID NO: 18216 - DNA, 19 bp, Artificial Sequence
  Target B2M Sequence complement
gaagttgacttactgaaga

SEQ ID NO: 18217 - DNA, 19 bp, Artificial Sequence
  Target B2M Sequence complement
aagttgacttactgaagaa

SEQ ID NO: 18218 - DNA, 19 bp, Artificial Sequence
  Target B2M Sequence complement
agttgacttactgaagaat

SEQ ID NO: 18219 - DNA, 19 bp, Artificial Sequence
  Target B2M Sequence complement
gttgacttactgaagaatg

SEQ ID NO: 18220 - DNA, 19 bp, Artificial Sequence
  Target B2M Sequence complement
ttgacttactgaagaatgg

SEQ ID NO: 18221 - DNA, 19 bp, Artificial Sequence
  Target B2M Sequence complement
tgacttactgaagaatgga

SEQ ID NO: 18222 - DNA, 19 bp, Artificial Sequence
  Target B2M Sequence complement
gacttactgaagaatggag

SEQ ID NO: 18223 - DNA, 19 bp, Artificial Sequence
  Target B2M Sequence complement
acttactgaagaatggaga

SEQ ID NO: 18224 - DNA, 19 bp, Artificial Sequence
  Target B2M Sequence complement
cttactgaagaatggagag

SEQ ID NO: 18225 - DNA, 19 bp, Artificial Sequence
  Target B2M Sequence complement
ttactgaagaatggagaga

SEQ ID NO: 18226 - DNA, 19 bp, Artificial Sequence
  Target B2M Sequence complement
tactgaagaatggagagag

SEQ ID NO: 18227 - DNA, 19 bp, Artificial Sequence
  Target B2M Sequence complement
actgaagaatggagagaga

SEQ ID NO: 18228 - DNA, 19 bp, Artificial Sequence
  Target B2M Sequence complement
ctgaagaatggagagagaa

SEQ ID NO: 18229 - DNA, 19 bp, Artificial Sequence
  Target B2M Sequence complement
tgaagaatggagagagaat

SEQ ID NO: 18230 - DNA, 19 bp, Artificial Sequence
  Target B2M Sequence complement
gaagaatggagagagaatt

SEQ ID NO: 18231 - DNA, 19 bp, Artificial Sequence
  Target B2M Sequence complement
aagaatggagagagaattg

SEQ ID NO: 18232 - DNA, 19 bp, Artificial Sequence
  Target B2M Sequence complement
agaatggagagagaattga

SEQ ID NO: 18233 - DNA, 19 bp, Artificial Sequence
  Target B2M Sequence complement
gaatggagagagaattgaa

SEQ ID NO: 18234 - DNA, 19 bp, Artificial Sequence
  Target B2M Sequence complement
aatggagagagaattgaaa

SEQ ID NO: 18235 - DNA, 19 bp, Artificial Sequence
  Target B2M Sequence complement
aaagtggagcattcagact

SEQ ID NO: 18236 - DNA, 19 bp, Artificial Sequence
  Target B2M Sequence complement
aagtggagcattcagactt

SEQ ID NO: 18237 - DNA, 19 bp, Artificial Sequence
  Target B2M Sequence complement
agtggagcattcagacttg

SEQ ID NO: 18238 - DNA, 19 bp, Artificial Sequence
  Target B2M Sequence complement
gtggagcattcagacttgt

SEQ ID NO: 18239 - DNA, 19 bp, Artificial Sequence
  Target B2M Sequence complement
tggagcattcagacttgtc

SEQ ID NO: 18240 - DNA, 19 bp, Artificial Sequence
  Target B2M Sequence complement
ggagcattcagacttgtct

SEQ ID NO: 18241 - DNA, 19 bp, Artificial Sequence
  Target B2M Sequence complement
gagcattcagacttgtctt

SEQ ID NO: 18242 - DNA, 19 bp, Artificial Sequence
  Target B2M Sequence complement
agcattcagacttgtcttt

SEQ ID NO: 18243 - DNA, 19 bp, Artificial Sequence
  Target B2M Sequence complement
gcattcagacttgtctttc

SEQ ID NO: 18244 - DNA, 19 bp, Artificial Sequence
  Target B2M Sequence complement
cattcagacttgtctttca

SEQ ID NO: 18245 - DNA, 19 bp, Artificial Sequence
  Target B2M Sequence complement
attcagacttgtctttcag

SEQ ID NO: 18246 - DNA, 19 bp, Artificial Sequence
  Target B2M Sequence complement
ttcagacttgtctttcagc

SEQ ID NO: 18247 - DNA, 19 bp, Artificial Sequence
  Target B2M Sequence complement
tcagacttgtctttcagca

SEQ ID NO: 18248 - DNA, 19 bp, Artificial Sequence
  Target B2M Sequence complement
cagacttgtctttcagcaa

SEQ ID NO: 18249 - DNA, 19 bp, Artificial Sequence
  Target B2M Sequence complement
agacttgtctttcagcaag

SEQ ID NO: 18250 - DNA, 19 bp, Artificial Sequence
  Target B2M Sequence complement
gacttgtctttcagcaagg

SEQ ID NO: 18251 - DNA, 19 bp, Artificial Sequence
  Target B2M Sequence complement
acttgtctttcagcaagga

SEQ ID NO: 18252 - DNA, 19 bp, Artificial Sequence
  Target B2M Sequence complement
cttgtctttcagcaaggac

SEQ ID NO: 18253 - DNA, 19 bp, Artificial Sequence
  Target B2M Sequence complement
ttgtctttcagcaaggact

SEQ ID NO: 18254 - DNA, 19 bp, Artificial Sequence
  Target B2M Sequence complement
tgtctttcagcaaggactg

SEQ ID NO: 18255 - DNA, 19 bp, Artificial Sequence
  Target B2M Sequence complement
gtctttcagcaaggactgg

SEQ ID NO: 18256 - DNA, 19 bp, Artificial Sequence
  Target B2M Sequence complement
tctttcagcaaggactggt

SEQ ID NO: 18257 - DNA, 19 bp, Artificial Sequence
  Target B2M Sequence complement
ctttcagcaaggactggtc

SEQ ID NO: 18258 - DNA, 19 bp, Artificial Sequence
  Target B2M Sequence complement
tttcagcaaggactggtct

SEQ ID NO: 18259 - DNA, 19 bp, Artificial Sequence
  Target B2M Sequence complement
ttcagcaaggactggtctt

SEQ ID NO: 18260 - DNA, 19 bp, Artificial Sequence
  Target B2M Sequence complement
tcagcaaggactggtcttt

SEQ ID NO: 18261 - DNA, 19 bp, Artificial Sequence
  Target B2M Sequence complement
cagcaaggactggtctttc

SEQ ID NO: 18262 - DNA, 19 bp, Artificial Sequence
  Target B2M Sequence complement
agcaaggactggtctttct

SEQ ID NO: 18263 - DNA, 19 bp, Artificial Sequence
  Target B2M Sequence complement
gcaaggactggtctttcta

SEQ ID NO: 18264 - DNA, 19 bp, Artificial Sequence
  Target B2M Sequence complement
caaggactggtctttctat

SEQ ID NO: 18265 - DNA, 19 bp, Artificial Sequence
  Target B2M Sequence complement
aaggactggtctttctatc

SEQ ID NO: 18266 - DNA, 19 bp, Artificial Sequence
  Target B2M Sequence complement
aggactggtctttctatct

SEQ ID NO: 18267 - DNA, 19 bp, Artificial Sequence
  Target B2M Sequence complement
ggactggtctttctatctc

SEQ ID NO: 18268 - DNA, 19 bp, Artificial Sequence
  Target B2M Sequence complement
gactggtctttctatctct

SEQ ID NO: 18269 - DNA, 19 bp, Artificial Sequence
  Target B2M Sequence complement
actggtctttctatctctt

SEQ ID NO: 18270 - DNA, 19 bp, Artificial Sequence
  Target B2M Sequence complement
ctggtctttctatctcttg

SEQ ID NO: 18271 - DNA, 19 bp, Artificial Sequence
  Target B2M Sequence complement
tggtctttctatctcttgt

SEQ ID NO: 18272 - DNA, 19 bp, Artificial Sequence
  Target B2M Sequence complement
ggtctttctatctcttgta

SEQ ID NO: 18273 - DNA, 19 bp, Artificial Sequence
  Target B2M Sequence complement
gtctttctatctcttgtac

SEQ ID NO: 18274 - DNA, 19 bp, Artificial Sequence
  Target B2M Sequence complement
tctttctatctcttgtact

SEQ ID NO: 18275 - DNA, 19 bp, Artificial Sequence
  Target B2M Sequence complement
ctttctatctcttgtacta

SEQ ID NO: 18276 - DNA, 19 bp, Artificial Sequence
  Target B2M Sequence complement
tttctatctcttgtactac

SEQ ID NO: 18277 - DNA, 19 bp, Artificial Sequence
  Target B2M Sequence complement
ttctatctcttgtactaca

SEQ ID NO: 18278 - DNA, 19 bp, Artificial Sequence
  Target B2M Sequence complement
tctatctcttgtactacac

SEQ ID NO: 18279 - DNA, 19 bp, Artificial Sequence
  Target B2M Sequence complement
ctatctcttgtactacact

SEQ ID NO: 18280 - DNA, 19 bp, Artificial Sequence
  Target B2M Sequence complement
tatctcttgtactacactg

SEQ ID NO: 18281 - DNA, 19 bp, Artificial Sequence
  Target B2M Sequence complement
atctcttgtactacactga

SEQ ID NO: 18282 - DNA, 19 bp, Artificial Sequence
  Target B2M Sequence complement
tctcttgtactacactgaa

SEQ ID NO: 18283 - DNA, 19 bp, Artificial Sequence
  Target B2M Sequence complement
ctcttgtactacactgaat

SEQ ID NO: 18284 - DNA, 19 bp, Artificial Sequence
  Target B2M Sequence complement
tcttgtactacactgaatt

SEQ ID NO: 18285 - DNA, 19 bp, Artificial Sequence
  Target B2M Sequence complement
cttgtactacactgaattc

SEQ ID NO: 18286 - DNA, 19 bp, Artificial Sequence
  Target B2M Sequence complement
ttgtactacactgaattca

SEQ ID NO: 18287 - DNA, 19 bp, Artificial Sequence
  Target B2M Sequence complement
tgtactacactgaattcac

SEQ ID NO: 18288 - DNA, 19 bp, Artificial Sequence
  Target B2M Sequence complement
gtactacactgaattcacc

SEQ ID NO: 18289 - DNA, 19 bp, Artificial Sequence
  Target B2M Sequence complement
tactacactgaattcaccc

SEQ ID NO: 18290 - DNA, 19 bp, Artificial Sequence
  Target B2M Sequence complement
aaagatgagtatgcctgcc

SEQ ID NO: 18291 - DNA, 19 bp, Artificial Sequence
  Target B2M Sequence complement
aagatgagtatgcctgccg

SEQ ID NO: 18292 - DNA, 19 bp, Artificial Sequence
  Target B2M Sequence complement
agatgagtatgcctgccgt

SEQ ID NO: 18293 - DNA, 19 bp, Artificial Sequence
  Target B2M Sequence complement
gatgagtatgcctgccgtg

SEQ ID NO: 18294 - DNA, 19 bp, Artificial Sequence
  Target B2M Sequence complement
atgagtatgcctgccgtgt

SEQ ID NO: 18295 - DNA, 19 bp, Artificial Sequence
  Target B2M Sequence complement
tgagtatgcctgccgtgtg

SEQ ID NO: 18296 - DNA, 19 bp, Artificial Sequence
  Target B2M Sequence complement
gagtatgcctgccgtgtga

SEQ ID NO: 18297 - DNA, 19 bp, Artificial Sequence
  Target B2M Sequence complement
agtatgcctgccgtgtgaa

SEQ ID NO: 18298 - DNA, 19 bp, Artificial Sequence
  Target B2M Sequence complement
gtatgcctgccgtgtgaac

SEQ ID NO: 18299 - DNA, 19 bp, Artificial Sequence
  Target B2M Sequence complement
tatgcctgccgtgtgaacc

SEQ ID NO: 18300 - DNA, 19 bp, Artificial Sequence
  Target B2M Sequence complement
atgcctgccgtgtgaacca

SEQ ID NO: 18301 - DNA, 19 bp, Artificial Sequence
  Target B2M Sequence complement
tgcctgccgtgtgaaccat

SEQ ID NO: 18302 - DNA, 19 bp, Artificial Sequence
  Target B2M Sequence complement
cctgccgtgtgaaccatgt

SEQ ID NO: 18303 - DNA, 19 bp, Artificial Sequence
  Target B2M Sequence complement
ctgccgtgtgaaccatgtg

SEQ ID NO: 18304 - DNA, 19 bp, Artificial Sequence
  Target B2M Sequence complement
tgccgtgtgaaccatgtga

SEQ ID NO: 18305 - DNA, 19 bp, Artificial Sequence
  Target B2M Sequence complement
gccgtgtgaaccatgtgac

SEQ ID NO: 18306 - DNA, 19 bp, Artificial Sequence
  Target B2M Sequence complement
ccgtgtgaaccatgtgact

SEQ ID NO: 18307 - DNA, 19 bp, Artificial Sequence
  Target B2M Sequence complement
cgtgtgaaccatgtgactt

SEQ ID NO: 18308 - DNA, 19 bp, Artificial Sequence
  Target B2M Sequence complement
gtgtgaaccatgtgacttt

SEQ ID NO: 18309 - DNA, 19 bp, Artificial Sequence
  Target B2M Sequence complement
tgtgaaccatgtgactttg

SEQ ID NO: 18310 - DNA, 19 bp, Artificial Sequence
  Target B2M Sequence complement
gtgaaccatgtgactttgt

SEQ ID NO: 18311 - DNA, 19 bp, Artificial Sequence
  Target B2M Sequence complement
tgaaccatgtgactttgtc

SEQ ID NO: 18312 - DNA, 19 bp, Artificial Sequence
  Target B2M Sequence complement
gaaccatgtgactttgtca

SEQ ID NO: 18313 - DNA, 19 bp, Artificial Sequence
  Target B2M Sequence complement
aaccatgtgactttgtcac

SEQ ID NO: 18314 - DNA, 19 bp, Artificial Sequence
  Target B2M Sequence complement
accatgtgactttgtcaca

SEQ ID NO: 18315 - DNA, 19 bp, Artificial Sequence
  Target B2M Sequence complement
ccatgtgactttgtcacag

SEQ ID NO: 18316 - DNA, 19 bp, Artificial Sequence
  Target B2M Sequence complement
catgtgactttgtcacagc

SEQ ID NO: 18317 - DNA, 19 bp, Artificial Sequence
  Target B2M Sequence complement
atgtgactttgtcacagcc

SEQ ID NO: 18318 - DNA, 19 bp, Artificial Sequence
  Target B2M Sequence complement
tgtgactttgtcacagccc

SEQ ID NO: 18319 - DNA, 19 bp, Artificial Sequence
  Target B2M Sequence complement
gtgactttgtcacagccca

SEQ ID NO: 18320 - DNA, 19 bp, Artificial Sequence
  Target B2M Sequence complement
tgactttgtcacagcccaa

SEQ ID NO: 18321 - DNA, 19 bp, Artificial Sequence
  Target B2M Sequence complement
gactttgtcacagcccaag

SEQ ID NO: 18322 - DNA, 19 bp, Artificial Sequence
  Target B2M Sequence complement
actttgtcacagcccaaga

SEQ ID NO: 18323 - DNA, 19 bp, Artificial Sequence
  Target B2M Sequence complement
ctttgtcacagcccaagat

SEQ ID NO: 18324 - DNA, 19 bp, Artificial Sequence
  Target B2M Sequence complement
tttgtcacagcccaagata

SEQ ID NO: 18325 - DNA, 19 bp, Artificial Sequence
  Target B2M Sequence complement
ttgtcacagcccaagatag

SEQ ID NO: 18326 - DNA, 19 bp, Artificial Sequence
  Target B2M Sequence complement
tgtcacagcccaagatagt

SEQ ID NO: 18327 - DNA, 19 bp, Artificial Sequence
  Target B2M Sequence complement
gtcacagcccaagatagtt

SEQ ID NO: 18328 - DNA, 19 bp, Artificial Sequence
  Target B2M Sequence complement
tcacagcccaagatagtta

SEQ ID NO: 18329 - DNA, 19 bp, Artificial Sequence
  Target B2M Sequence complement
cacagcccaagatagttaa

SEQ ID NO: 18330 - DNA, 19 bp, Artificial Sequence
  Target B2M Sequence complement
acagcccaagatagttaag

SEQ ID NO: 18331 - DNA, 19 bp, Artificial Sequence
  Target B2M Sequence complement
cagcccaagatagttaagt

SEQ ID NO: 18332 - DNA, 19 bp, Artificial Sequence
  Target B2M Sequence complement
agcccaagatagttaagtg

SEQ ID NO: 18333 - DNA, 19 bp, Artificial Sequence
  Target B2M Sequence complement
gcccaagatagttaagtgg

SEQ ID NO: 18334 - DNA, 19 bp, Artificial Sequence
  Target B2M Sequence complement
cccaagatagttaagtggg

SEQ ID NO: 18335 - DNA, 19 bp, Artificial Sequence
  Target B2M Sequence complement
ccaagatagttaagtggga

SEQ ID NO: 18336 - DNA, 19 bp, Artificial Sequence
  Target B2M Sequence complement
caagatagttaagtgggat

SEQ ID NO: 18337 - DNA, 19 bp, Artificial Sequence
  Target B2M Sequence complement
aagatagttaagtgggatc

SEQ ID NO: 18338 - DNA, 19 bp, Artificial Sequence
  Target B2M Sequence complement
agatagttaagtgggatcg

SEQ ID NO: 18339 - DNA, 19 bp, Artificial Sequence
  Target B2M Sequence complement
gatagttaagtgggatcga

SEQ ID NO: 18340 - DNA, 19 bp, Artificial Sequence
  Target B2M Sequence complement
atagttaagtgggatcgag

SEQ ID NO: 18341 - DNA, 19 bp, Artificial Sequence
  Target B2M Sequence complement
tagttaagtgggatcgaga

SEQ ID NO: 18342 - DNA, 19 bp, Artificial Sequence
  Target B2M Sequence complement
agttaagtgggatcgagac

SEQ ID NO: 18343 - DNA, 19 bp, Artificial Sequence
  Target B2M Sequence complement
gttaagtgggatcgagaca

SEQ ID NO: 18344 - DNA, 19 bp, Artificial Sequence
  Target B2M Sequence complement
ttaagtgggatcgagacat

SEQ ID NO: 18345 - DNA, 19 bp, Artificial Sequence
  Target B2M Sequence complement
taagtgggatcgagacatg

SEQ ID NO: 18346 - DNA, 19 bp, Artificial Sequence
  Target B2M Sequence complement
aagtgggatcgagacatgt

SEQ ID NO: 18347 - DNA, 19 bp, Artificial Sequence
  Target B2M Sequence complement
agtgggatcgagacatgta

SEQ ID NO: 18348 - DNA, 19 bp, Artificial Sequence
  Target B2M Sequence complement
gtgggatcgagacatgtaa

SEQ ID NO: 18349 - DNA, 19 bp, Artificial Sequence
  Target B2M Sequence complement
tgggatcgagacatgtaag

SEQ ID NO: 18350 - DNA, 19 bp, Artificial Sequence
  Target B2M Sequence complement
gggatcgagacatgtaagc

SEQ ID NO: 18351 - DNA, 19 bp, Artificial Sequence
  Target B2M Sequence complement
ggatcgagacatgtaagca

SEQ ID NO: 18352 - DNA, 19 bp, Artificial Sequence
  Target B2M Sequence complement
gatcgagacatgtaagcag

SEQ ID NO: 18353 - DNA, 19 bp, Artificial Sequence
  Target B2M Sequence complement
atcgagacatgtaagcagc

SEQ ID NO: 18354 - DNA, 19 bp, Artificial Sequence
  Target B2M Sequence complement
tcgagacatgtaagcagca

SEQ ID NO: 18355 - DNA, 19 bp, Artificial Sequence
  Target B2M Sequence complement
cgagacatgtaagcagcat

SEQ ID NO: 18356 - DNA, 19 bp, Artificial Sequence
  Target B2M Sequence complement
gagacatgtaagcagcatc

SEQ ID NO: 18357 - DNA, 19 bp, Artificial Sequence
  Target B2M Sequence complement
agacatgtaagcagcatca

SEQ ID NO: 18358 - DNA, 19 bp, Artificial Sequence
  Target B2M Sequence complement
gacatgtaagcagcatcat

SEQ ID NO: 18359 - DNA, 19 bp, Artificial Sequence
  Target B2M Sequence complement
acatgtaagcagcatcatg

SEQ ID NO: 18360 - DNA, 19 bp, Artificial Sequence
  Target B2M Sequence complement
catgtaagcagcatcatgg

SEQ ID NO: 18361 - DNA, 19 bp, Artificial Sequence
  Target B2M Sequence complement
atgtaagcagcatcatgga

SEQ ID NO: 18362 - DNA, 19 bp, Artificial Sequence
  Target B2M Sequence complement
tgtaagcagcatcatggag

SEQ ID NO: 18363 - DNA, 19 bp, Artificial Sequence
  Target B2M Sequence complement
gtaagcagcatcatggagg

SEQ ID NO: 18364 - DNA, 19 bp, Artificial Sequence
  Target B2M Sequence complement
taagcagcatcatggaggt

SEQ ID NO: 18365 - DNA, 19 bp, Artificial Sequence
  Target B2M Sequence complement
aagcagcatcatggaggtt

SEQ ID NO: 18366 - DNA, 19 bp, Artificial Sequence
  Target B2M Sequence complement
agcagcatcatggaggttt

SEQ ID NO: 18367 - DNA, 19 bp, Artificial Sequence
  Target B2M Sequence complement
gcagcatcatggaggtttg

SEQ ID NO: 18368 - DNA, 19 bp, Artificial Sequence
  Target B2M Sequence complement
cagcatcatggaggtttga

SEQ ID NO: 18369 - DNA, 19 bp, Artificial Sequence
  Target B2M Sequence complement
agcatcatggaggtttgaa

SEQ ID NO: 18370 - DNA, 19 bp, Artificial Sequence
  Target B2M Sequence complement
gcatcatggaggtttgaag

SEQ ID NO: 18371 - DNA, 19 bp, Artificial Sequence
  Target B2M Sequence complement
catcatggaggtttgaaga

SEQ ID NO: 18372 - DNA, 19 bp, Artificial Sequence
  Target B2M Sequence complement
atcatggaggtttgaagat

SEQ ID NO: 18373 - DNA, 19 bp, Artificial Sequence
  Target B2M Sequence complement
tcatggaggtttgaagatg

SEQ ID NO: 18374 - DNA, 19 bp, Artificial Sequence
  Target B2M Sequence complement
catggaggtttgaagatgc

SEQ ID NO: 18375 - DNA, 19 bp, Artificial Sequence
  Target B2M Sequence complement
atggaggtttgaagatgcc

SEQ ID NO: 18376 - DNA, 19 bp, Artificial Sequence
  Target B2M Sequence complement
tggaggtttgaagatgccg

SEQ ID NO: 18377 - DNA, 19 bp, Artificial Sequence
  Target B2M Sequence complement
ggaggtttgaagatgccgc

SEQ ID NO: 18378 - DNA, 19 bp, Artificial Sequence
  Target B2M Sequence complement
gaggtttgaagatgccgca

SEQ ID NO: 18379 - DNA, 19 bp, Artificial Sequence
  Target B2M Sequence complement
aggtttgaagatgccgcat

SEQ ID NO: 18380 - DNA, 19 bp, Artificial Sequence
  Target B2M Sequence complement
ggtttgaagatgccgcatt

SEQ ID NO: 18381 - DNA, 19 bp, Artificial Sequence
  Target B2M Sequence complement
gtttgaagatgccgcattt

SEQ ID NO: 18382 - DNA, 19 bp, Artificial Sequence
  Target B2M Sequence complement
tttgaagatgccgcatttg

SEQ ID NO: 18383 - DNA, 19 bp, Artificial Sequence
  Target B2M Sequence complement
ttgaagatgccgcatttgg

SEQ ID NO: 18384 - DNA, 19 bp, Artificial Sequence
  Target B2M Sequence complement
tgaagatgccgcatttgga

SEQ ID NO: 18385 - DNA, 19 bp, Artificial Sequence
  Target B2M Sequence complement
gaagatgccgcatttggat

SEQ ID NO: 18386 - DNA, 19 bp, Artificial Sequence
  Target B2M Sequence complement
aagatgccgcatttggatt

SEQ ID NO: 18387 - DNA, 19 bp, Artificial Sequence
  Target B2M Sequence complement
agatgccgcatttggattg

SEQ ID NO: 18388 - DNA, 19 bp, Artificial Sequence
  Target B2M Sequence complement
gatgccgcatttggattgg

SEQ ID NO: 18389 - DNA, 19 bp, Artificial Sequence
  Target B2M Sequence complement
atgccgcatttggattgga

SEQ ID NO: 18390 - DNA, 19 bp, Artificial Sequence
  Target B2M Sequence complement
tgccgcatttggattggat

SEQ ID NO: 18391 - DNA, 19 bp, Artificial Sequence
  Target B2M Sequence complement
gccgcatttggattggatg

SEQ ID NO: 18392 - DNA, 19 bp, Artificial Sequence
  Target B2M Sequence complement
ccgcatttggattggatga

SEQ ID NO: 18393 - DNA, 19 bp, Artificial Sequence
  Target B2M Sequence complement
cgcatttggattggatgaa

SEQ ID NO: 18394 - DNA, 19 bp, Artificial Sequence
  Target B2M Sequence complement
gcatttggattggatgaat

SEQ ID NO: 18395 - DNA, 19 bp, Artificial Sequence
  Target B2M Sequence complement
catttggattggatgaatt

SEQ ID NO: 18396 - DNA, 19 bp, Artificial Sequence
  Target B2M Sequence complement
atttggattggatgaattc

SEQ ID NO: 18397 - DNA, 19 bp, Artificial Sequence
  Target B2M Sequence complement
tttggattggatgaattcc

SEQ ID NO: 18398 - DNA, 19 bp, Artificial Sequence
  Target B2M Sequence complement
ttggattggatgaattcca

SEQ ID NO: 18399 - DNA, 19 bp, Artificial Sequence
  Target B2M Sequence complement
tggattggatgaattccaa

SEQ ID NO: 18400 - DNA, 19 bp, Artificial Sequence
  Target B2M Sequence complement
ggattggatgaattccaaa

SEQ ID NO: 18401 - DNA, 19 bp, Artificial Sequence
  Target B2M Sequence complement
gattggatgaattccaaat

SEQ ID NO: 18402 - DNA, 19 bp, Artificial Sequence
  Target B2M Sequence complement
attggatgaattccaaatt

SEQ ID NO: 18403 - DNA, 19 bp, Artificial Sequence
  Target B2M Sequence complement
ttggatgaattccaaattc

SEQ ID NO: 18404 - DNA, 19 bp, Artificial Sequence
  Target B2M Sequence complement
tggatgaattccaaattct

SEQ ID NO: 18405 - DNA, 19 bp, Artificial Sequence
  Target B2M Sequence complement
ggatgaattccaaattctg

SEQ ID NO: 18406 - DNA, 19 bp, Artificial Sequence
  Target B2M Sequence complement
gatgaattccaaattctgc

SEQ ID NO: 18407 - DNA, 19 bp, Artificial Sequence
  Target B2M Sequence complement
atgaattccaaattctgct

SEQ ID NO: 18408 - DNA, 19 bp, Artificial Sequence
  Target B2M Sequence complement
tgaattccaaattctgctt

SEQ ID NO: 18409 - DNA, 19 bp, Artificial Sequence
  Target B2M Sequence complement
gaattccaaattctgcttg

SEQ ID NO: 18410 - DNA, 19 bp, Artificial Sequence
  Target B2M Sequence complement
aattccaaattctgcttgc

SEQ ID NO: 18411 - DNA, 19 bp, Artificial Sequence
  Target B2M Sequence complement
attccaaattctgcttgct

SEQ ID NO: 18412 - DNA, 19 bp, Artificial Sequence
  Target B2M Sequence complement
ttccaaattctgcttgctt

SEQ ID NO: 18413 - DNA, 19 bp, Artificial Sequence
  Target B2M Sequence complement
tccaaattctgcttgcttg

SEQ ID NO: 18414 - DNA, 19 bp, Artificial Sequence
  Target B2M Sequence complement
ccaaattctgcttgcttgc

SEQ ID NO: 18415 - DNA, 19 bp, Artificial Sequence
  Target B2M Sequence complement
caaattctgcttgcttgct

SEQ ID NO: 18416 - DNA, 19 bp, Artificial Sequence
  Target B2M Sequence complement
aaattctgcttgcttgctt

SEQ ID NO: 18417 - DNA, 19 bp, Artificial Sequence
  Target B2M Sequence complement
aattctgcttgcttgcttt

SEQ ID NO: 18418 - DNA, 19 bp, Artificial Sequence
  Target B2M Sequence complement
tattgatatgcttatacac

SEQ ID NO: 18419 - DNA, 19 bp, Artificial Sequence
  Target B2M Sequence complement
attgatatgcttatacact

SEQ ID NO: 18420 - DNA, 19 bp, Artificial Sequence
  Target B2M Sequence complement
ttgatatgcttatacactt

SEQ ID NO: 18421 - DNA, 19 bp, Artificial Sequence
  Target B2M Sequence complement
tgatatgcttatacactta

SEQ ID NO: 18422 - DNA, 19 bp, Artificial Sequence
  Target B2M Sequence complement
gatatgcttatacacttac

SEQ ID NO: 18423 - DNA, 19 bp, Artificial Sequence
  Target B2M Sequence complement
atatgcttatacacttaca

SEQ ID NO: 18424 - DNA, 19 bp, Artificial Sequence
  Target B2M Sequence complement
tatgcttatacacttacac

SEQ ID NO: 18425 - DNA, 19 bp, Artificial Sequence
  Target B2M Sequence complement
atgcttatacacttacact

SEQ ID NO: 18426 - DNA, 19 bp, Artificial Sequence
  Target B2M Sequence complement
tgcttatacacttacactt

SEQ ID NO: 18427 - DNA, 19 bp, Artificial Sequence
  Target B2M Sequence complement
gcttatacacttacacttt

SEQ ID NO: 18428 - DNA, 19 bp, Artificial Sequence
  Target B2M Sequence complement
cttatacacttacacttta

SEQ ID NO: 18429 - DNA, 19 bp, Artificial Sequence
  Target B2M Sequence complement
tatacacttacactttatg

SEQ ID NO: 18430 - DNA, 19 bp, Artificial Sequence
  Target B2M Sequence complement
atacacttacactttatgc

SEQ ID NO: 18431 - DNA, 19 bp, Artificial Sequence
  Target B2M Sequence complement
tacacttacactttatgca

SEQ ID NO: 18432 - DNA, 19 bp, Artificial Sequence
  Target B2M Sequence complement
acacttacactttatgcac

SEQ ID NO: 18433 - DNA, 19 bp, Artificial Sequence
  Target B2M Sequence complement
cacttacactttatgcaca

SEQ ID NO: 18434 - DNA, 19 bp, Artificial Sequence
  Target B2M Sequence complement
acttacactttatgcacaa

SEQ ID NO: 18435 - DNA, 19 bp, Artificial Sequence
  Target B2M Sequence complement
cttacactttatgcacaaa

SEQ ID NO: 18436 - DNA, 19 bp, Artificial Sequence
  Target B2M Sequence complement
atgtagggttataataatg

SEQ ID NO: 18437 - DNA, 19 bp, Artificial Sequence
  Target B2M Sequence complement
tgtagggttataataatgt

SEQ ID NO: 18438 - DNA, 19 bp, Artificial Sequence
  Target B2M Sequence complement
gtagggttataataatgtt

SEQ ID NO: 18439 - DNA, 19 bp, Artificial Sequence
  Target B2M Sequence complement
gggttataataatgttaac

SEQ ID NO: 18440 - DNA, 19 bp, Artificial Sequence
  Target B2M Sequence complement
taataatgttaacatggac

SEQ ID NO: 18441 - DNA, 19 bp, Artificial Sequence
  Target B2M Sequence complement
aataatgttaacatggaca

SEQ ID NO: 18442 - DNA, 19 bp, Artificial Sequence
  Target B2M Sequence complement
ataatgttaacatggacat

SEQ ID NO: 18443 - DNA, 19 bp, Artificial Sequence
  Target B2M Sequence complement
taatgttaacatggacatg

SEQ ID NO: 18444 - DNA, 19 bp, Artificial Sequence
  Target B2M Sequence complement
aatgttaacatggacatga

SEQ ID NO: 18445 - DNA, 19 bp, Artificial Sequence
  Target B2M Sequence complement
atgttaacatggacatgat

SEQ ID NO: 18446 - DNA, 19 bp, Artificial Sequence
  Target B2M Sequence complement
tgttaacatggacatgatc

SEQ ID NO: 18447 - DNA, 19 bp, Artificial Sequence
  Target B2M Sequence complement
gttaacatggacatgatct

SEQ ID NO: 18448 - DNA, 19 bp, Artificial Sequence
  Target B2M Sequence complement
ttaacatggacatgatctt

SEQ ID NO: 18449 - DNA, 19 bp, Artificial Sequence
  Target B2M Sequence complement
taacatggacatgatcttc

SEQ ID NO: 18450 - DNA, 19 bp, Artificial Sequence
  Target B2M Sequence complement
aacatggacatgatcttct

SEQ ID NO: 18451 - DNA, 19 bp, Artificial Sequence
  Target B2M Sequence complement
acatggacatgatcttctt

SEQ ID NO: 18452 - DNA, 19 bp, Artificial Sequence
  Target B2M Sequence complement
catggacatgatcttcttt

SEQ ID NO: 18453 - DNA, 19 bp, Artificial Sequence
  Target B2M Sequence complement
atggacatgatcttcttta

SEQ ID NO: 18454 - DNA, 19 bp, Artificial Sequence
  Target B2M Sequence complement
tggacatgatcttctttat

SEQ ID NO: 18455 - DNA, 19 bp, Artificial Sequence
  Target B2M Sequence complement
ggacatgatcttctttata

SEQ ID NO: 18456 - DNA, 19 bp, Artificial Sequence
  Target B2M Sequence complement
gacatgatcttctttataa

SEQ ID NO: 18457 - DNA, 19 bp, Artificial Sequence
  Target B2M Sequence complement
tataattctactttgagtg

SEQ ID NO: 18458 - DNA, 19 bp, Artificial Sequence
  Target B2M Sequence complement
ataattctactttgagtgc

SEQ ID NO: 18459 - DNA, 19 bp, Artificial Sequence
  Target B2M Sequence complement
taattctactttgagtgct

SEQ ID NO: 18460 - DNA, 19 bp, Artificial Sequence
  Target B2M Sequence complement
aattctactttgagtgctg

SEQ ID NO: 18461 - DNA, 19 bp, Artificial Sequence
  Target B2M Sequence complement
attctactttgagtgctgt

SEQ ID NO: 18462 - DNA, 19 bp, Artificial Sequence
  Target B2M Sequence complement
ttctactttgagtgctgtc

SEQ ID NO: 18463 - DNA, 19 bp, Artificial Sequence
  Target B2M Sequence complement
tctactttgagtgctgtct

SEQ ID NO: 18464 - DNA, 19 bp, Artificial Sequence
  Target B2M Sequence complement
ctactttgagtgctgtctc

SEQ ID NO: 18465 - DNA, 19 bp, Artificial Sequence
  Target B2M Sequence complement
tactttgagtgctgtctcc

SEQ ID NO: 18466 - DNA, 19 bp, Artificial Sequence
  Target B2M Sequence complement
actttgagtgctgtctcca

SEQ ID NO: 18467 - DNA, 19 bp, Artificial Sequence
  Target B2M Sequence complement
ctttgagtgctgtctccat

SEQ ID NO: 18468 - DNA, 19 bp, Artificial Sequence
  Target B2M Sequence complement
tttgagtgctgtctccatg

SEQ ID NO: 18469 - DNA, 19 bp, Artificial Sequence
  Target B2M Sequence complement
ttgagtgctgtctccatgt

SEQ ID NO: 18470 - DNA, 19 bp, Artificial Sequence
  Target B2M Sequence complement
tgagtgctgtctccatgtt

SEQ ID NO: 18471 - DNA, 19 bp, Artificial Sequence
  Target B2M Sequence complement
gagtgctgtctccatgttt

SEQ ID NO: 18472 - DNA, 19 bp, Artificial Sequence
  Target B2M Sequence complement
agtgctgtctccatgtttg

SEQ ID NO: 18473 - DNA, 19 bp, Artificial Sequence
  Target B2M Sequence complement
gtgctgtctccatgtttga

SEQ ID NO: 18474 - DNA, 19 bp, Artificial Sequence
  Target B2M Sequence complement
tgctgtctccatgtttgat

SEQ ID NO: 18475 - DNA, 19 bp, Artificial Sequence
  Target B2M Sequence complement
gctgtctccatgtttgatg

SEQ ID NO: 18476 - DNA, 19 bp, Artificial Sequence
  Target B2M Sequence complement
ctgtctccatgtttgatgt

SEQ ID NO: 18477 - DNA, 19 bp, Artificial Sequence
  Target B2M Sequence complement
tgtctccatgtttgatgta

SEQ ID NO: 18478 - DNA, 19 bp, Artificial Sequence
  Target B2M Sequence complement
gtctccatgtttgatgtat

SEQ ID NO: 18479 - DNA, 19 bp, Artificial Sequence
  Target B2M Sequence complement
tctccatgtttgatgtatc

SEQ ID NO: 18480 - DNA, 19 bp, Artificial Sequence
  Target B2M Sequence complement
ctccatgtttgatgtatct

SEQ ID NO: 18481 - DNA, 19 bp, Artificial Sequence
  Target B2M Sequence complement
tccatgtttgatgtatctg

SEQ ID NO: 18482 - DNA, 19 bp, Artificial Sequence
  Target B2M Sequence complement
ccatgtttgatgtatctga

SEQ ID NO: 18483 - DNA, 19 bp, Artificial Sequence
  Target B2M Sequence complement
catgtttgatgtatctgag

SEQ ID NO: 18484 - DNA, 19 bp, Artificial Sequence
  Target B2M Sequence complement
atgtttgatgtatctgagc

SEQ ID NO: 18485 - DNA, 19 bp, Artificial Sequence
  Target B2M Sequence complement
tgtttgatgtatctgagca

SEQ ID NO: 18486 - DNA, 19 bp, Artificial Sequence
  Target B2M Sequence complement
gtttgatgtatctgagcag

SEQ ID NO: 18487 - DNA, 19 bp, Artificial Sequence
  Target B2M Sequence complement
tttgatgtatctgagcagg

SEQ ID NO: 18488 - DNA, 19 bp, Artificial Sequence
  Target B2M Sequence complement
ttgatgtatctgagcaggt

SEQ ID NO: 18489 - DNA, 19 bp, Artificial Sequence
  Target B2M Sequence complement
tgatgtatctgagcaggtt

SEQ ID NO: 18490 - DNA, 19 bp, Artificial Sequence
  Target B2M Sequence complement
gatgtatctgagcaggttg

SEQ ID NO: 18491 - DNA, 19 bp, Artificial Sequence
  Target B2M Sequence complement
atgtatctgagcaggttgc

SEQ ID NO: 18492 - DNA, 19 bp, Artificial Sequence
  Target B2M Sequence complement
tgtatctgagcaggttgct

SEQ ID NO: 18493 - DNA, 19 bp, Artificial Sequence
  Target B2M Sequence complement
gtatctgagcaggttgctc

SEQ ID NO: 18494 - DNA, 19 bp, Artificial Sequence
  Target B2M Sequence complement
tatctgagcaggttgctcc

SEQ ID NO: 18495 - DNA, 19 bp, Artificial Sequence
  Target B2M Sequence complement
atctgagcaggttgctcca

SEQ ID NO: 18496 - DNA, 19 bp, Artificial Sequence
  Target B2M Sequence complement
tctgagcaggttgctccac

SEQ ID NO: 18497 - DNA, 19 bp, Artificial Sequence
  Target B2M Sequence complement
ctgagcaggttgctccaca

SEQ ID NO: 18498 - DNA, 19 bp, Artificial Sequence
  Target B2M Sequence complement
tgagcaggttgctccacag

SEQ ID NO: 18499 - DNA, 19 bp, Artificial Sequence
  Target B2M Sequence complement
agcaggttgctccacaggt

SEQ ID NO: 18500 - DNA, 19 bp, Artificial Sequence
  Target B2M Sequence complement
gcaggttgctccacaggta

SEQ ID NO: 18501 - DNA, 19 bp, Artificial Sequence
  Target B2M Sequence complement
caggttgctccacaggtag

SEQ ID NO: 18502 - DNA, 19 bp, Artificial Sequence
  Target B2M Sequence complement
aggttgctccacaggtagc

SEQ ID NO: 18503 - DNA, 19 bp, Artificial Sequence
  Target B2M Sequence complement
ggttgctccacaggtagct

SEQ ID NO: 18504 - DNA, 19 bp, Artificial Sequence
  Target B2M Sequence complement
gttgctccacaggtagctc

SEQ ID NO: 18505 - DNA, 19 bp, Artificial Sequence
  Target B2M Sequence complement
ttgctccacaggtagctct

SEQ ID NO: 18506 - DNA, 19 bp, Artificial Sequence
  Target B2M Sequence complement
tgctccacaggtagctcta

SEQ ID NO: 18507 - DNA, 19 bp, Artificial Sequence
  Target B2M Sequence complement
gctccacaggtagctctag

SEQ ID NO: 18508 - DNA, 19 bp, Artificial Sequence
  Target B2M Sequence complement
ctccacaggtagctctagg

SEQ ID NO: 18509 - DNA, 19 bp, Artificial Sequence
  Target B2M Sequence complement
tccacaggtagctctagga

SEQ ID NO: 18510 - DNA, 19 bp, Artificial Sequence
  Target B2M Sequence complement
ccacaggtagctctaggag

SEQ ID NO: 18511 - DNA, 19 bp, Artificial Sequence
  Target B2M Sequence complement
cacaggtagctctaggagg

SEQ ID NO: 18512 - DNA, 19 bp, Artificial Sequence
  Target B2M Sequence complement
acaggtagctctaggaggg

SEQ ID NO: 18513 - DNA, 19 bp, Artificial Sequence
  Target B2M Sequence complement
aggtagctctaggagggct

SEQ ID NO: 18514 - DNA, 19 bp, Artificial Sequence
  Target B2M Sequence complement
tctaggagggctggcaact

SEQ ID NO: 18515 - DNA, 19 bp, Artificial Sequence
  Target B2M Sequence complement
ctaggagggctggcaactt

SEQ ID NO: 18516 - DNA, 19 bp, Artificial Sequence
  Target B2M Sequence complement
taggagggctggcaactta

SEQ ID NO: 18517 - DNA, 19 bp, Artificial Sequence
  Target B2M Sequence complement
aggagggctggcaacttag

SEQ ID NO: 18518 - DNA, 19 bp, Artificial Sequence
  Target B2M Sequence complement
ggagggctggcaacttaga

SEQ ID NO: 18519 - DNA, 19 bp, Artificial Sequence
  Target B2M Sequence complement
gagggctggcaacttagag

SEQ ID NO: 18520 - DNA, 19 bp, Artificial Sequence
  Target B2M Sequence complement
agggctggcaacttagagg

SEQ ID NO: 18521 - DNA, 19 bp, Artificial Sequence
  Target B2M Sequence complement
gggctggcaacttagaggt

SEQ ID NO: 18522 - DNA, 19 bp, Artificial Sequence
  Target B2M Sequence complement
ggctggcaacttagaggtg

SEQ ID NO: 18523 - DNA, 19 bp, Artificial Sequence
  Target B2M Sequence complement
gctggcaacttagaggtgg

SEQ ID NO: 18524 - DNA, 19 bp, Artificial Sequence
  Target B2M Sequence complement
ctggcaacttagaggtggg

SEQ ID NO: 18525 - DNA, 19 bp, Artificial Sequence
  Target B2M Sequence complement
gggagcagagaattctctt

SEQ ID NO: 18526 - DNA, 19 bp, Artificial Sequence
  Target B2M Sequence complement
ggagcagagaattctctta

SEQ ID NO: 18527 - DNA, 19 bp, Artificial Sequence
  Target B2M Sequence complement
gagcagagaattctcttat

SEQ ID NO: 18528 - DNA, 19 bp, Artificial Sequence
  Target B2M Sequence complement
agcagagaattctcttatc

SEQ ID NO: 18529 - DNA, 19 bp, Artificial Sequence
  Target B2M Sequence complement
gcagagaattctcttatcc

SEQ ID NO: 18530 - DNA, 19 bp, Artificial Sequence
  Target B2M Sequence complement
cagagaattctcttatcca

SEQ ID NO: 18531 - DNA, 19 bp, Artificial Sequence
  Target B2M Sequence complement
agagaattctcttatccaa

SEQ ID NO: 18532 - DNA, 19 bp, Artificial Sequence
  Target B2M Sequence complement
gagaattctcttatccaac

SEQ ID NO: 18533 - DNA, 19 bp, Artificial Sequence
  Target B2M Sequence complement
agaattctcttatccaaca

SEQ ID NO: 18534 - DNA, 19 bp, Artificial Sequence
  Target B2M Sequence complement
gaattctcttatccaacat

SEQ ID NO: 18535 - DNA, 19 bp, Artificial Sequence
  Target B2M Sequence complement
aattctcttatccaacatc

SEQ ID NO: 18536 - DNA, 19 bp, Artificial Sequence
  Target B2M Sequence complement
attctcttatccaacatca

SEQ ID NO: 18537 - DNA, 19 bp, Artificial Sequence
  Target B2M Sequence complement
ttctcttatccaacatcaa

SEQ ID NO: 18538 - DNA, 19 bp, Artificial Sequence
  Target B2M Sequence complement
tctcttatccaacatcaac

SEQ ID NO: 18539 - DNA, 19 bp, Artificial Sequence
  Target B2M Sequence complement
ctcttatccaacatcaaca

SEQ ID NO: 18540 - DNA, 19 bp, Artificial Sequence
  Target B2M Sequence complement
tcttatccaacatcaacat

SEQ ID NO: 18541 - DNA, 19 bp, Artificial Sequence
  Target B2M Sequence complement
cttatccaacatcaacatc

SEQ ID NO: 18542 - DNA, 19 bp, Artificial Sequence
  Target B2M Sequence complement
ttatccaacatcaacatct

SEQ ID NO: 18543 - DNA, 19 bp, Artificial Sequence
  Target B2M Sequence complement
tatccaacatcaacatctt

SEQ ID NO: 18544 - DNA, 19 bp, Artificial Sequence
  Target B2M Sequence complement
atccaacatcaacatcttg

SEQ ID NO: 18545 - DNA, 19 bp, Artificial Sequence
  Target B2M Sequence complement
tccaacatcaacatcttgg

SEQ ID NO: 18546 - DNA, 19 bp, Artificial Sequence
  Target B2M Sequence complement
ccaacatcaacatcttggt

SEQ ID NO: 18547 - DNA, 19 bp, Artificial Sequence
  Target B2M Sequence complement
caacatcaacatcttggtc

SEQ ID NO: 18548 - DNA, 19 bp, Artificial Sequence
  Target B2M Sequence complement
aacatcaacatcttggtca

SEQ ID NO: 18549 - DNA, 19 bp, Artificial Sequence
  Target B2M Sequence complement
acatcaacatcttggtcag

SEQ ID NO: 18550 - DNA, 19 bp, Artificial Sequence
  Target B2M Sequence complement
catcaacatcttggtcaga

SEQ ID NO: 18551 - DNA, 19 bp, Artificial Sequence
  Target B2M Sequence complement
atcaacatcttggtcagat

SEQ ID NO: 18552 - DNA, 19 bp, Artificial Sequence
  Target B2M Sequence complement
tcaacatcttggtcagatt

SEQ ID NO: 18553 - DNA, 19 bp, Artificial Sequence
  Target B2M Sequence complement
caacatcttggtcagattt

SEQ ID NO: 18554 - DNA, 19 bp, Artificial Sequence
  Target B2M Sequence complement
aacatcttggtcagatttg

SEQ ID NO: 18555 - DNA, 19 bp, Artificial Sequence
  Target B2M Sequence complement
acatcttggtcagatttga

SEQ ID NO: 18556 - DNA, 19 bp, Artificial Sequence
  Target B2M Sequence complement
catcttggtcagatttgaa

SEQ ID NO: 18557 - DNA, 19 bp, Artificial Sequence
  Target B2M Sequence complement
atcttggtcagatttgaac

SEQ ID NO: 18558 - DNA, 19 bp, Artificial Sequence
  Target B2M Sequence complement
tcttggtcagatttgaact

SEQ ID NO: 18559 - DNA, 19 bp, Artificial Sequence
  Target B2M Sequence complement
cttggtcagatttgaactc

SEQ ID NO: 18560 - DNA, 19 bp, Artificial Sequence
  Target B2M Sequence complement
ttggtcagatttgaactct

SEQ ID NO: 18561 - DNA, 19 bp, Artificial Sequence
  Target B2M Sequence complement
tggtcagatttgaactctt

SEQ ID NO: 18562 - DNA, 19 bp, Artificial Sequence
  Target B2M Sequence complement
ggtcagatttgaactcttc

SEQ ID NO: 18563 - DNA, 19 bp, Artificial Sequence
  Target B2M Sequence complement
gtcagatttgaactcttca

SEQ ID NO: 18564 - DNA, 19 bp, Artificial Sequence
  Target B2M Sequence complement
tcagatttgaactcttcaa

SEQ ID NO: 18565 - DNA, 19 bp, Artificial Sequence
  Target B2M Sequence complement
cagatttgaactcttcaat

SEQ ID NO: 18566 - DNA, 19 bp, Artificial Sequence
  Target B2M Sequence complement
agatttgaactcttcaatc

SEQ ID NO: 18567 - DNA, 19 bp, Artificial Sequence
  Target B2M Sequence complement
gatttgaactcttcaatct

SEQ ID NO: 18568 - DNA, 19 bp, Artificial Sequence
  Target B2M Sequence complement
atttgaactcttcaatctc

SEQ ID NO: 18569 - DNA, 19 bp, Artificial Sequence
  Target B2M Sequence complement
tttgaactcttcaatctct

SEQ ID NO: 18570 - DNA, 19 bp, Artificial Sequence
  Target B2M Sequence complement
ttgaactcttcaatctctt

SEQ ID NO: 18571 - DNA, 19 bp, Artificial Sequence
  Target B2M Sequence complement
tgaactcttcaatctcttg

SEQ ID NO: 18572 - DNA, 19 bp, Artificial Sequence
  Target B2M Sequence complement
gaactcttcaatctcttgc

SEQ ID NO: 18573 - DNA, 19 bp, Artificial Sequence
  Target B2M Sequence complement
aactcttcaatctcttgca

SEQ ID NO: 18574 - DNA, 19 bp, Artificial Sequence
  Target B2M Sequence complement
actcttcaatctcttgcac

SEQ ID NO: 18575 - DNA, 19 bp, Artificial Sequence
  Target B2M Sequence complement
ctcttcaatctcttgcact

SEQ ID NO: 18576 - DNA, 19 bp, Artificial Sequence
  Target B2M Sequence complement
tcttcaatctcttgcactc

SEQ ID NO: 18577 - DNA, 19 bp, Artificial Sequence
  Target B2M Sequence complement
cttcaatctcttgcactca

SEQ ID NO: 18578 - DNA, 19 bp, Artificial Sequence
  Target B2M Sequence complement
ttcaatctcttgcactcaa

SEQ ID NO: 18579 - DNA, 19 bp, Artificial Sequence
  Target B2M Sequence complement
tcaatctcttgcactcaaa

SEQ ID NO: 18580 - DNA, 19 bp, Artificial Sequence
  Target B2M Sequence complement
caatctcttgcactcaaag

SEQ ID NO: 18581 - DNA, 19 bp, Artificial Sequence
  Target B2M Sequence complement
aatctcttgcactcaaagc

SEQ ID NO: 18582 - DNA, 19 bp, Artificial Sequence
  Target B2M Sequence complement
atctcttgcactcaaagct

SEQ ID NO: 18583 - DNA, 19 bp, Artificial Sequence
  Target B2M Sequence complement
tctcttgcactcaaagctt

SEQ ID NO: 18584 - DNA, 19 bp, Artificial Sequence
  Target B2M Sequence complement
ctcttgcactcaaagcttg

SEQ ID NO: 18585 - DNA, 19 bp, Artificial Sequence
  Target B2M Sequence complement
tcttgcactcaaagcttgt

SEQ ID NO: 18586 - DNA, 19 bp, Artificial Sequence
  Target B2M Sequence complement
cttgcactcaaagcttgtt

SEQ ID NO: 18587 - DNA, 19 bp, Artificial Sequence
  Target B2M Sequence complement
ttgcactcaaagcttgtta

SEQ ID NO: 18588 - DNA, 19 bp, Artificial Sequence
  Target B2M Sequence complement
tgcactcaaagcttgttaa

SEQ ID NO: 18589 - DNA, 19 bp, Artificial Sequence
  Target B2M Sequence complement
gcactcaaagcttgttaag

SEQ ID NO: 18590 - DNA, 19 bp, Artificial Sequence
  Target B2M Sequence complement
cactcaaagcttgttaaga

SEQ ID NO: 18591 - DNA, 19 bp, Artificial Sequence
  Target B2M Sequence complement
actcaaagcttgttaagat

SEQ ID NO: 18592 - DNA, 19 bp, Artificial Sequence
  Target B2M Sequence complement
ctcaaagcttgttaagata

SEQ ID NO: 18593 - DNA, 19 bp, Artificial Sequence
  Target B2M Sequence complement
tcaaagcttgttaagatag

SEQ ID NO: 18594 - DNA, 19 bp, Artificial Sequence
  Target B2M Sequence complement
caaagcttgttaagatagt

SEQ ID NO: 18595 - DNA, 19 bp, Artificial Sequence
  Target B2M Sequence complement
aaagcttgttaagatagtt

SEQ ID NO: 18596 - DNA, 19 bp, Artificial Sequence
  Target B2M Sequence complement
aagcttgttaagatagtta

SEQ ID NO: 18597 - DNA, 19 bp, Artificial Sequence
  Target B2M Sequence complement
agcttgttaagatagttaa

SEQ ID NO: 18598 - DNA, 19 bp, Artificial Sequence
  Target B2M Sequence complement
gcttgttaagatagttaag

SEQ ID NO: 18599 - DNA, 19 bp, Artificial Sequence
  Target B2M Sequence complement
cttgttaagatagttaagc

SEQ ID NO: 18600 - DNA, 19 bp, Artificial Sequence
  Target B2M Sequence complement
ttgttaagatagttaagcg

SEQ ID NO: 18601 - DNA, 19 bp, Artificial Sequence
  Target B2M Sequence complement
tgttaagatagttaagcgt

SEQ ID NO: 18602 - DNA, 19 bp, Artificial Sequence
  Target B2M Sequence complement
gttaagatagttaagcgtg

SEQ ID NO: 18603 - DNA, 19 bp, Artificial Sequence
  Target B2M Sequence complement
ttaagatagttaagcgtgc

SEQ ID NO: 18604 - DNA, 19 bp, Artificial Sequence
  Target B2M Sequence complement
taagatagttaagcgtgca

SEQ ID NO: 18605 - DNA, 19 bp, Artificial Sequence
  Target B2M Sequence complement
aagatagttaagcgtgcat

SEQ ID NO: 18606 - DNA, 19 bp, Artificial Sequence
  Target B2M Sequence complement
agatagttaagcgtgcata

SEQ ID NO: 18607 - DNA, 19 bp, Artificial Sequence
  Target B2M Sequence complement
gatagttaagcgtgcataa

SEQ ID NO: 18608 - DNA, 19 bp, Artificial Sequence
  Target B2M Sequence complement
atagttaagcgtgcataag

SEQ ID NO: 18609 - DNA, 19 bp, Artificial Sequence
  Target B2M Sequence complement
tagttaagcgtgcataagt

SEQ ID NO: 18610 - DNA, 19 bp, Artificial Sequence
  Target B2M Sequence complement
agttaagcgtgcataagtt

SEQ ID NO: 18611 - DNA, 19 bp, Artificial Sequence
  Target B2M Sequence complement
gttaagcgtgcataagtta

SEQ ID NO: 18612 - DNA, 19 bp, Artificial Sequence
  Target B2M Sequence complement
ttaagcgtgcataagttaa

SEQ ID NO: 18613 - DNA, 19 bp, Artificial Sequence
  Target B2M Sequence complement
taagcgtgcataagttaac

SEQ ID NO: 18614 - DNA, 19 bp, Artificial Sequence
  Target B2M Sequence complement
aagcgtgcataagttaact

SEQ ID NO: 18615 - DNA, 19 bp, Artificial Sequence
  Target B2M Sequence complement
agcgtgcataagttaactt

SEQ ID NO: 18616 - DNA, 19 bp, Artificial Sequence
  Target B2M Sequence complement
gcgtgcataagttaacttc

SEQ ID NO: 18617 - DNA, 19 bp, Artificial Sequence
  Target B2M Sequence complement
cgtgcataagttaacttcc

SEQ ID NO: 18618 - DNA, 19 bp, Artificial Sequence
  Target B2M Sequence complement
gtgcataagttaacttcca

SEQ ID NO: 18619 - DNA, 19 bp, Artificial Sequence
  Target B2M Sequence complement
tgcataagttaacttccaa

SEQ ID NO: 18620 - DNA, 19 bp, Artificial Sequence
  Target B2M Sequence complement
gcataagttaacttccaat

SEQ ID NO: 18621 - DNA, 19 bp, Artificial Sequence
  Target B2M Sequence complement
cataagttaacttccaatt

SEQ ID NO: 18622 - DNA, 19 bp, Artificial Sequence
  Target B2M Sequence complement
aagttaacttccaatttac

SEQ ID NO: 18623 - DNA, 19 bp, Artificial Sequence
  Target B2M Sequence complement
agttaacttccaatttaca

SEQ ID NO: 18624 - DNA, 19 bp, Artificial Sequence
  Target B2M Sequence complement
gttaacttccaatttacat

SEQ ID NO: 18625 - DNA, 19 bp, Artificial Sequence
  Target B2M Sequence complement
taacttccaatttacatac

SEQ ID NO: 18626 - DNA, 19 bp, Artificial Sequence
  Target B2M Sequence complement
aacttccaatttacatact

SEQ ID NO: 18627 - DNA, 19 bp, Artificial Sequence
  Target B2M Sequence complement
acttccaatttacatactc

SEQ ID NO: 18628 - DNA, 19 bp, Artificial Sequence
  Target B2M Sequence complement
cttccaatttacatactct

SEQ ID NO: 18629 - DNA, 19 bp, Artificial Sequence
  Target B2M Sequence complement
ttccaatttacatactctg

SEQ ID NO: 18630 - DNA, 19 bp, Artificial Sequence
  Target B2M Sequence complement
tccaatttacatactctgc

SEQ ID NO: 18631 - DNA, 19 bp, Artificial Sequence
  Target B2M Sequence complement
ccaatttacatactctgct

SEQ ID NO: 18632 - DNA, 19 bp, Artificial Sequence
  Target B2M Sequence complement
caatttacatactctgctt

SEQ ID NO: 18633 - DNA, 19 bp, Artificial Sequence
  Target B2M Sequence complement
aatttacatactctgctta

SEQ ID NO: 18634 - DNA, 19 bp, Artificial Sequence
  Target B2M Sequence complement
atttacatactctgcttag

SEQ ID NO: 18635 - DNA, 19 bp, Artificial Sequence
  Target B2M Sequence complement
tttacatactctgcttaga

SEQ ID NO: 18636 - DNA, 19 bp, Artificial Sequence
  Target B2M Sequence complement
ttacatactctgcttagaa

SEQ ID NO: 18637 - DNA, 19 bp, Artificial Sequence
  Target B2M Sequence complement
tacatactctgcttagaat

SEQ ID NO: 18638 - DNA, 19 bp, Artificial Sequence
  Target B2M Sequence complement
acatactctgcttagaatt

SEQ ID NO: 18639 - DNA, 19 bp, Artificial Sequence
  Target B2M Sequence complement
catactctgcttagaattt

SEQ ID NO: 18640 - DNA, 19 bp, Artificial Sequence
  Target B2M Sequence complement
atactctgcttagaatttg

SEQ ID NO: 18641 - DNA, 19 bp, Artificial Sequence
  Target B2M Sequence complement
tactctgcttagaatttgg

SEQ ID NO: 18642 - DNA, 19 bp, Artificial Sequence
  Target B2M Sequence complement
actctgcttagaatttggg

SEQ ID NO: 18643 - DNA, 19 bp, Artificial Sequence
  Target B2M Sequence complement
tagaaatataattgacagg

SEQ ID NO: 18644 - DNA, 19 bp, Artificial Sequence
  Target B2M Sequence complement
agaaatataattgacagga

SEQ ID NO: 18645 - DNA, 19 bp, Artificial Sequence
  Target B2M Sequence complement
gaaatataattgacaggat

SEQ ID NO: 18646 - DNA, 19 bp, Artificial Sequence
  Target B2M Sequence complement
ataattgacaggattattg

SEQ ID NO: 18647 - DNA, 19 bp, Artificial Sequence
  Target B2M Sequence complement
taattgacaggattattgg

SEQ ID NO: 18648 - DNA, 19 bp, Artificial Sequence
  Target B2M Sequence complement
aattgacaggattattgga

SEQ ID NO: 18649 - DNA, 19 bp, Artificial Sequence
  Target B2M Sequence complement
attgacaggattattggaa

SEQ ID NO: 18650 - DNA, 19 bp, Artificial Sequence
  Target B2M Sequence complement
ttgacaggattattggaaa

SEQ ID NO: 18651 - DNA, 19 bp, Artificial Sequence
  Target B2M Sequence complement
tgacaggattattggaaat

SEQ ID NO: 18652 - DNA, 19 bp, Artificial Sequence
  Target B2M Sequence complement
gacaggattattggaaatt

SEQ ID NO: 18653 - DNA, 19 bp, Artificial Sequence
  Target B2M Sequence complement
acaggattattggaaattt

SEQ ID NO: 18654 - DNA, 19 bp, Artificial Sequence
  Target B2M Sequence complement
caggattattggaaatttg

SEQ ID NO: 18655 - DNA, 19 bp, Artificial Sequence
  Target B2M Sequence complement
aggattattggaaatttgt

SEQ ID NO: 18656 - DNA, 19 bp, Artificial Sequence
  Target B2M Sequence complement
ggattattggaaatttgtt

SEQ ID NO: 18657 - DNA, 19 bp, Artificial Sequence
  Target B2M Sequence complement
tacatttgataaagtaagg

SEQ ID NO: 18658 - DNA, 19 bp, Artificial Sequence
  Target B2M Sequence complement
acatttgataaagtaaggc

SEQ ID NO: 18659 - DNA, 19 bp, Artificial Sequence
  Target B2M Sequence complement
catttgataaagtaaggca

SEQ ID NO: 18660 - DNA, 19 bp, Artificial Sequence
  Target B2M Sequence complement
atttgataaagtaaggcat

SEQ ID NO: 18661 - DNA, 19 bp, Artificial Sequence
  Target B2M Sequence complement
tttgataaagtaaggcatg

SEQ ID NO: 18662 - DNA, 19 bp, Artificial Sequence
  Target B2M Sequence complement
ttgataaagtaaggcatgg

SEQ ID NO: 18663 - DNA, 19 bp, Artificial Sequence
  Target B2M Sequence complement
tgataaagtaaggcatggt

SEQ ID NO: 18664 - DNA, 19 bp, Artificial Sequence
  Target B2M Sequence complement
gataaagtaaggcatggtt

SEQ ID NO: 18665 - DNA, 19 bp, Artificial Sequence
  Target B2M Sequence complement
ataaagtaaggcatggttg

SEQ ID NO: 18666 - DNA, 19 bp, Artificial Sequence
  Target B2M Sequence complement
taaagtaaggcatggttgt

SEQ ID NO: 18667 - DNA, 19 bp, Artificial Sequence
  Target B2M Sequence complement
aaagtaaggcatggttgtg

SEQ ID NO: 18668 - DNA, 19 bp, Artificial Sequence
  Target B2M Sequence complement
aagtaaggcatggttgtgg

SEQ ID NO: 18669 - DNA, 19 bp, Artificial Sequence
  Target B2M Sequence complement
agtaaggcatggttgtggt

SEQ ID NO: 18670 - DNA, 19 bp, Artificial Sequence
  Target B2M Sequence complement
gtaaggcatggttgtggtt

SEQ ID NO: 18671 - DNA, 19 bp, Artificial Sequence
  Target B2M Sequence complement
taaggcatggttgtggtta

SEQ ID NO: 18672 - DNA, 19 bp, Artificial Sequence
  Target B2M Sequence complement
aaggcatggttgtggttaa

SEQ ID NO: 18673 - DNA, 19 bp, Artificial Sequence
  Target B2M Sequence complement
aggcatggttgtggttaat

SEQ ID NO: 18674 - DNA, 19 bp, Artificial Sequence
  Target B2M Sequence complement
ggcatggttgtggttaatc

SEQ ID NO: 18675 - DNA, 19 bp, Artificial Sequence
  Target B2M Sequence complement
gcatggttgtggttaatct

SEQ ID NO: 18676 - DNA, 19 bp, Artificial Sequence
  Target B2M Sequence complement
catggttgtggttaatctg

SEQ ID NO: 18677 - DNA, 19 bp, Artificial Sequence
  Target B2M Sequence complement
atggttgtggttaatctgg

SEQ ID NO: 18678 - DNA, 19 bp, Artificial Sequence
  Target B2M Sequence complement
tggttgtggttaatctggt

SEQ ID NO: 18679 - DNA, 19 bp, Artificial Sequence
  Target B2M Sequence complement
ggttgtggttaatctggtt

SEQ ID NO: 18680 - DNA, 19 bp, Artificial Sequence
  Target B2M Sequence complement
gttgtggttaatctggttt

SEQ ID NO: 18681 - DNA, 19 bp, Artificial Sequence
  Target B2M Sequence complement
ttgtggttaatctggttta

SEQ ID NO: 18682 - DNA, 19 bp, Artificial Sequence
  Target B2M Sequence complement
tgtggttaatctggtttat

SEQ ID NO: 18683 - DNA, 19 bp, Artificial Sequence
  Target B2M Sequence complement
gtggttaatctggtttatt

SEQ ID NO: 18684 - DNA, 19 bp, Artificial Sequence
  Target B2M Sequence complement
tggttaatctggtttattt

SEQ ID NO: 18685 - DNA, 19 bp, Artificial Sequence
  Target B2M Sequence complement
tttgttccacaagttaaat

SEQ ID NO: 18686 - DNA, 19 bp, Artificial Sequence
  Target B2M Sequence complement
ttgttccacaagttaaata

SEQ ID NO: 18687 - DNA, 19 bp, Artificial Sequence
  Target B2M Sequence complement
tgttccacaagttaaataa

SEQ ID NO: 18688 - DNA, 19 bp, Artificial Sequence
  Target B2M Sequence complement
gttccacaagttaaataaa

SEQ ID NO: 18689 - DNA, 19 bp, Artificial Sequence
  Target B2M Sequence complement
tccacaagttaaataaatc

SEQ ID NO: 18690 - DNA, 19 bp, Artificial Sequence
  Target B2M Sequence complement
ccacaagttaaataaatca

SEQ ID NO: 18691 - DNA, 20 bp, Artificial Sequence
  Target B2M Sequence complement
attcctgaagctgacagcat

SEQ ID NO: 18692 - DNA, 20 bp, Artificial Sequence
  Target B2M Sequence complement
ttcctgaagctgacagcatt

SEQ ID NO: 18693 - DNA, 20 bp, Artificial Sequence
  Target B2M Sequence complement
tcctgaagctgacagcattc

SEQ ID NO: 18694 - DNA, 20 bp, Artificial Sequence
  Target B2M Sequence complement
cctgaagctgacagcattcg

SEQ ID NO: 18695 - DNA, 20 bp, Artificial Sequence
  Target B2M Sequence complement
ctgaagctgacagcattcgg

SEQ ID NO: 18696 - DNA, 20 bp, Artificial Sequence
  Target B2M Sequence complement
tgaagctgacagcattcggg

SEQ ID NO: 18697 - DNA, 20 bp, Artificial Sequence
  Target B2M Sequence complement
ttagctgtgctcgcgctact

SEQ ID NO: 18698 - DNA, 20 bp, Artificial Sequence
  Target B2M Sequence complement
tgctcgcgctactctctctt

SEQ ID NO: 18699 - DNA, 20 bp, Artificial Sequence
  Target B2M Sequence complement
gctcgcgctactctctcttt

SEQ ID NO: 18700 - DNA, 20 bp, Artificial Sequence
  Target B2M Sequence complement
tcgcgctactctctctttct

SEQ ID NO: 18701 - DNA, 20 bp, Artificial Sequence
  Target B2M Sequence complement
cgcgctactctctctttctg

SEQ ID NO: 18702 - DNA, 20 bp, Artificial Sequence
  Target B2M Sequence complement
gcgctactctctctttctgg

SEQ ID NO: 18703 - DNA, 20 bp, Artificial Sequence
  Target B2M Sequence complement
cgctactctctctttctggc

SEQ ID NO: 18704 - DNA, 20 bp, Artificial Sequence
  Target B2M Sequence complement
gctactctctctttctggcc

SEQ ID NO: 18705 - DNA, 20 bp, Artificial Sequence
  Target B2M Sequence complement
ctactctctctttctggcct

SEQ ID NO: 18706 - DNA, 20 bp, Artificial Sequence
  Target B2M Sequence complement
tactctctctttctggcctg

SEQ ID NO: 18707 - DNA, 20 bp, Artificial Sequence
  Target B2M Sequence complement
ctctctctttctggcctgga

SEQ ID NO: 18708 - DNA, 20 bp, Artificial Sequence
  Target B2M Sequence complement
tctctctttctggcctggag

SEQ ID NO: 18709 - DNA, 20 bp, Artificial Sequence
  Target B2M Sequence complement
tctttctggcctggaggcta

SEQ ID NO: 18710 - DNA, 20 bp, Artificial Sequence
  Target B2M Sequence complement
ctttctggcctggaggctat

SEQ ID NO: 18711 - DNA, 20 bp, Artificial Sequence
  Target B2M Sequence complement
tttctggcctggaggctatc

SEQ ID NO: 18712 - DNA, 20 bp, Artificial Sequence
  Target B2M Sequence complement
tggaggctatccagcgtact

SEQ ID NO: 18713 - DNA, 20 bp, Artificial Sequence
  Target B2M Sequence complement
aggctatccagcgtactcca

SEQ ID NO: 18714 - DNA, 20 bp, Artificial Sequence
  Target B2M Sequence complement
ggctatccagcgtactccaa

SEQ ID NO: 18715 - DNA, 20 bp, Artificial Sequence
  Target B2M Sequence complement
gctatccagcgtactccaaa

SEQ ID NO: 18716 - DNA, 20 bp, Artificial Sequence
  Target B2M Sequence complement
ctatccagcgtactccaaag

SEQ ID NO: 18717 - DNA, 20 bp, Artificial Sequence
  Target B2M Sequence complement
tatccagcgtactccaaaga

SEQ ID NO: 18718 - DNA, 20 bp, Artificial Sequence
  Target B2M Sequence complement
atccagcgtactccaaagat

SEQ ID NO: 18719 - DNA, 20 bp, Artificial Sequence
  Target B2M Sequence complement
tccagcgtactccaaagatt

SEQ ID NO: 18720 - DNA, 20 bp, Artificial Sequence
  Target B2M Sequence complement
ccagcgtactccaaagattc

SEQ ID NO: 18721 - DNA, 20 bp, Artificial Sequence
  Target B2M Sequence complement
cagcgtactccaaagattca

SEQ ID NO: 18722 - DNA, 20 bp, Artificial Sequence
  Target B2M Sequence complement
agcgtactccaaagattcag

SEQ ID NO: 18723 - DNA, 20 bp, Artificial Sequence
  Target B2M Sequence complement
gcgtactccaaagattcagg

SEQ ID NO: 18724 - DNA, 20 bp, Artificial Sequence
  Target B2M Sequence complement
cgtactccaaagattcaggt

SEQ ID NO: 18725 - DNA, 20 bp, Artificial Sequence
  Target B2M Sequence complement
gtactccaaagattcaggtt

SEQ ID NO: 18726 - DNA, 20 bp, Artificial Sequence
  Target B2M Sequence complement
tactccaaagattcaggttt

SEQ ID NO: 18727 - DNA, 20 bp, Artificial Sequence
  Target B2M Sequence complement
actccaaagattcaggttta

SEQ ID NO: 18728 - DNA, 20 bp, Artificial Sequence
  Target B2M Sequence complement
ctccaaagattcaggtttac

SEQ ID NO: 18729 - DNA, 20 bp, Artificial Sequence
  Target B2M Sequence complement
tccaaagattcaggtttact

SEQ ID NO: 18730 - DNA, 20 bp, Artificial Sequence
  Target B2M Sequence complement
ccaaagattcaggtttactc

SEQ ID NO: 18731 - DNA, 20 bp, Artificial Sequence
  Target B2M Sequence complement
caaagattcaggtttactca

SEQ ID NO: 18732 - DNA, 20 bp, Artificial Sequence
  Target B2M Sequence complement
aaagattcaggtttactcac

SEQ ID NO: 18733 - DNA, 20 bp, Artificial Sequence
  Target B2M Sequence complement
aagattcaggtttactcacg

SEQ ID NO: 18734 - DNA, 20 bp, Artificial Sequence
  Target B2M Sequence complement
agattcaggtttactcacgt

SEQ ID NO: 18735 - DNA, 20 bp, Artificial Sequence
  Target B2M Sequence complement
gattcaggtttactcacgtc

SEQ ID NO: 18736 - DNA, 20 bp, Artificial Sequence
  Target B2M Sequence complement
attcaggtttactcacgtca

SEQ ID NO: 18737 - DNA, 20 bp, Artificial Sequence
  Target B2M Sequence complement
ttcaggtttactcacgtcat

SEQ ID NO: 18738 - DNA, 20 bp, Artificial Sequence
  Target B2M Sequence complement
tcaggtttactcacgtcatc

SEQ ID NO: 18739 - DNA, 20 bp, Artificial Sequence
  Target B2M Sequence complement
caggtttactcacgtcatcc

SEQ ID NO: 18740 - DNA, 20 bp, Artificial Sequence
  Target B2M Sequence complement
aggtttactcacgtcatcca

SEQ ID NO: 18741 - DNA, 20 bp, Artificial Sequence
  Target B2M Sequence complement
ggtttactcacgtcatccag

SEQ ID NO: 18742 - DNA, 20 bp, Artificial Sequence
  Target B2M Sequence complement
gtttactcacgtcatccagc

SEQ ID NO: 18743 - DNA, 20 bp, Artificial Sequence
  Target B2M Sequence complement
tttactcacgtcatccagca

SEQ ID NO: 18744 - DNA, 20 bp, Artificial Sequence
  Target B2M Sequence complement
ttactcacgtcatccagcag

SEQ ID NO: 18745 - DNA, 20 bp, Artificial Sequence
  Target B2M Sequence complement
tactcacgtcatccagcaga

SEQ ID NO: 18746 - DNA, 20 bp, Artificial Sequence
  Target B2M Sequence complement
actcacgtcatccagcagag

SEQ ID NO: 18747 - DNA, 20 bp, Artificial Sequence
  Target B2M Sequence complement
ctcacgtcatccagcagaga

SEQ ID NO: 18748 - DNA, 20 bp, Artificial Sequence
  Target B2M Sequence complement
tcacgtcatccagcagagaa

SEQ ID NO: 18749 - DNA, 20 bp, Artificial Sequence
  Target B2M Sequence complement
cacgtcatccagcagagaat

SEQ ID NO: 18750 - DNA, 20 bp, Artificial Sequence
  Target B2M Sequence complement
acgtcatccagcagagaatg

SEQ ID NO: 18751 - DNA, 20 bp, Artificial Sequence
  Target B2M Sequence complement
cgtcatccagcagagaatgg

SEQ ID NO: 18752 - DNA, 20 bp, Artificial Sequence
  Target B2M Sequence complement
gtcatccagcagagaatgga

SEQ ID NO: 18753 - DNA, 20 bp, Artificial Sequence
  Target B2M Sequence complement
tcatccagcagagaatggaa

SEQ ID NO: 18754 - DNA, 20 bp, Artificial Sequence
  Target B2M Sequence complement
catccagcagagaatggaaa

SEQ ID NO: 18755 - DNA, 20 bp, Artificial Sequence
  Target B2M Sequence complement
atccagcagagaatggaaag

SEQ ID NO: 18756 - DNA, 20 bp, Artificial Sequence
  Target B2M Sequence complement
tccagcagagaatggaaagt

SEQ ID NO: 18757 - DNA, 20 bp, Artificial Sequence
  Target B2M Sequence complement
ccagcagagaatggaaagtc

SEQ ID NO: 18758 - DNA, 20 bp, Artificial Sequence
  Target B2M Sequence complement
cagcagagaatggaaagtca

SEQ ID NO: 18759 - DNA, 20 bp, Artificial Sequence
  Target B2M Sequence complement
agcagagaatggaaagtcaa

SEQ ID NO: 18760 - DNA, 20 bp, Artificial Sequence
  Target B2M Sequence complement
gcagagaatggaaagtcaaa

SEQ ID NO: 18761 - DNA, 20 bp, Artificial Sequence
  Target B2M Sequence complement
cagagaatggaaagtcaaat

SEQ ID NO: 18762 - DNA, 20 bp, Artificial Sequence
  Target B2M Sequence complement
agagaatggaaagtcaaatt

SEQ ID NO: 18763 - DNA, 20 bp, Artificial Sequence
  Target B2M Sequence complement
gagaatggaaagtcaaattt

SEQ ID NO: 18764 - DNA, 20 bp, Artificial Sequence
  Target B2M Sequence complement
agaatggaaagtcaaatttc

SEQ ID NO: 18765 - DNA, 20 bp, Artificial Sequence
  Target B2M Sequence complement
gaatggaaagtcaaatttcc

SEQ ID NO: 18766 - DNA, 20 bp, Artificial Sequence
  Target B2M Sequence complement
aatggaaagtcaaatttcct

SEQ ID NO: 18767 - DNA, 20 bp, Artificial Sequence
  Target B2M Sequence complement
atggaaagtcaaatttcctg

SEQ ID NO: 18768 - DNA, 20 bp, Artificial Sequence
  Target B2M Sequence complement
tggaaagtcaaatttcctga

SEQ ID NO: 18769 - DNA, 20 bp, Artificial Sequence
  Target B2M Sequence complement
ggaaagtcaaatttcctgaa

SEQ ID NO: 18770 - DNA, 20 bp, Artificial Sequence
  Target B2M Sequence complement
gaaagtcaaatttcctgaat

SEQ ID NO: 18771 - DNA, 20 bp, Artificial Sequence
  Target B2M Sequence complement
aaagtcaaatttcctgaatt

SEQ ID NO: 18772 - DNA, 20 bp, Artificial Sequence
  Target B2M Sequence complement
aagtcaaatttcctgaattg

SEQ ID NO: 18773 - DNA, 20 bp, Artificial Sequence
  Target B2M Sequence complement
agtcaaatttcctgaattgc

SEQ ID NO: 18774 - DNA, 20 bp, Artificial Sequence
  Target B2M Sequence complement
gtcaaatttcctgaattgct

SEQ ID NO: 18775 - DNA, 20 bp, Artificial Sequence
  Target B2M Sequence complement
tcaaatttcctgaattgcta

SEQ ID NO: 18776 - DNA, 20 bp, Artificial Sequence
  Target B2M Sequence complement
caaatttcctgaattgctat

SEQ ID NO: 18777 - DNA, 20 bp, Artificial Sequence
  Target B2M Sequence complement
aaatttcctgaattgctatg

SEQ ID NO: 18778 - DNA, 20 bp, Artificial Sequence
  Target B2M Sequence complement
aatttcctgaattgctatgt

SEQ ID NO: 18779 - DNA, 20 bp, Artificial Sequence
  Target B2M Sequence complement
atttcctgaattgctatgtg

SEQ ID NO: 18780 - DNA, 20 bp, Artificial Sequence
  Target B2M Sequence complement
tttcctgaattgctatgtgt

SEQ ID NO: 18781 - DNA, 20 bp, Artificial Sequence
  Target B2M Sequence complement
ttcctgaattgctatgtgtc

SEQ ID NO: 18782 - DNA, 20 bp, Artificial Sequence
  Target B2M Sequence complement
tcctgaattgctatgtgtct

SEQ ID NO: 18783 - DNA, 20 bp, Artificial Sequence
  Target B2M Sequence complement
cctgaattgctatgtgtctg

SEQ ID NO: 18784 - DNA, 20 bp, Artificial Sequence
  Target B2M Sequence complement
ctgaattgctatgtgtctgg

SEQ ID NO: 18785 - DNA, 20 bp, Artificial Sequence
  Target B2M Sequence complement
tgaattgctatgtgtctggg

SEQ ID NO: 18786 - DNA, 20 bp, Artificial Sequence
  Target B2M Sequence complement
gaattgctatgtgtctgggt

SEQ ID NO: 18787 - DNA, 20 bp, Artificial Sequence
  Target B2M Sequence complement
aattgctatgtgtctgggtt

SEQ ID NO: 18788 - DNA, 20 bp, Artificial Sequence
  Target B2M Sequence complement
attgctatgtgtctgggttt

SEQ ID NO: 18789 - DNA, 20 bp, Artificial Sequence
  Target B2M Sequence complement
ttgctatgtgtctgggtttc

SEQ ID NO: 18790 - DNA, 20 bp, Artificial Sequence
  Target B2M Sequence complement
tgctatgtgtctgggtttca

SEQ ID NO: 18791 - DNA, 20 bp, Artificial Sequence
  Target B2M Sequence complement
gctatgtgtctgggtttcat

SEQ ID NO: 18792 - DNA, 20 bp, Artificial Sequence
  Target B2M Sequence complement
ctatgtgtctgggtttcatc

SEQ ID NO: 18793 - DNA, 20 bp, Artificial Sequence
  Target B2M Sequence complement
tatgtgtctgggtttcatcc

SEQ ID NO: 18794 - DNA, 20 bp, Artificial Sequence
  Target B2M Sequence complement
atgtgtctgggtttcatcca

SEQ ID NO: 18795 - DNA, 20 bp, Artificial Sequence
  Target B2M Sequence complement
tgtgtctgggtttcatccat

SEQ ID NO: 18796 - DNA, 20 bp, Artificial Sequence
  Target B2M Sequence complement
gtgtctgggtttcatccatc

SEQ ID NO: 18797 - DNA, 20 bp, Artificial Sequence
  Target B2M Sequence complement
tgtctgggtttcatccatcc

SEQ ID NO: 18798 - DNA, 20 bp, Artificial Sequence
  Target B2M Sequence complement
gtctgggtttcatccatccg

SEQ ID NO: 18799 - DNA, 20 bp, Artificial Sequence
  Target B2M Sequence complement
tctgggtttcatccatccga

SEQ ID NO: 18800 - DNA, 20 bp, Artificial Sequence
  Target B2M Sequence complement
ctgggtttcatccatccgac

SEQ ID NO: 18801 - DNA, 20 bp, Artificial Sequence
  Target B2M Sequence complement
tgggtttcatccatccgaca

SEQ ID NO: 18802 - DNA, 20 bp, Artificial Sequence
  Target B2M Sequence complement
gggtttcatccatccgacat

SEQ ID NO: 18803 - DNA, 20 bp, Artificial Sequence
  Target B2M Sequence complement
ggtttcatccatccgacatt

SEQ ID NO: 18804 - DNA, 20 bp, Artificial Sequence
  Target B2M Sequence complement
gtttcatccatccgacattg

SEQ ID NO: 18805 - DNA, 20 bp, Artificial Sequence
  Target B2M Sequence complement
tttcatccatccgacattga

SEQ ID NO: 18806 - DNA, 20 bp, Artificial Sequence
  Target B2M Sequence complement
ttcatccatccgacattgaa

SEQ ID NO: 18807 - DNA, 20 bp, Artificial Sequence
  Target B2M Sequence complement
tcatccatccgacattgaag

SEQ ID NO: 18808 - DNA, 20 bp, Artificial Sequence
  Target B2M Sequence complement
catccatccgacattgaagt

SEQ ID NO: 18809 - DNA, 20 bp, Artificial Sequence
  Target B2M Sequence complement
atccatccgacattgaagtt

SEQ ID NO: 18810 - DNA, 20 bp, Artificial Sequence
  Target B2M Sequence complement
tccatccgacattgaagttg

SEQ ID NO: 18811 - DNA, 20 bp, Artificial Sequence
  Target B2M Sequence complement
ccatccgacattgaagttga

SEQ ID NO: 18812 - DNA, 20 bp, Artificial Sequence
  Target B2M Sequence complement
catccgacattgaagttgac

SEQ ID NO: 18813 - DNA, 20 bp, Artificial Sequence
  Target B2M Sequence complement
atccgacattgaagttgact

SEQ ID NO: 18814 - DNA, 20 bp, Artificial Sequence
  Target B2M Sequence complement
tccgacattgaagttgactt

SEQ ID NO: 18815 - DNA, 20 bp, Artificial Sequence
  Target B2M Sequence complement
ccgacattgaagttgactta

SEQ ID NO: 18816 - DNA, 20 bp, Artificial Sequence
  Target B2M Sequence complement
cgacattgaagttgacttac

SEQ ID NO: 18817 - DNA, 20 bp, Artificial Sequence
  Target B2M Sequence complement
gacattgaagttgacttact

SEQ ID NO: 18818 - DNA, 20 bp, Artificial Sequence
  Target B2M Sequence complement
acattgaagttgacttactg

SEQ ID NO: 18819 - DNA, 20 bp, Artificial Sequence
  Target B2M Sequence complement
cattgaagttgacttactga

SEQ ID NO: 18820 - DNA, 20 bp, Artificial Sequence
  Target B2M Sequence complement
attgaagttgacttactgaa

SEQ ID NO: 18821 - DNA, 20 bp, Artificial Sequence
  Target B2M Sequence complement
ttgaagttgacttactgaag

SEQ ID NO: 18822 - DNA, 20 bp, Artificial Sequence
  Target B2M Sequence complement
tgaagttgacttactgaaga

SEQ ID NO: 18823 - DNA, 20 bp, Artificial Sequence
  Target B2M Sequence complement
aagttgacttactgaagaat

SEQ ID NO: 18824 - DNA, 20 bp, Artificial Sequence
  Target B2M Sequence complement
agttgacttactgaagaatg

SEQ ID NO: 18825 - DNA, 20 bp, Artificial Sequence
  Target B2M Sequence complement
gttgacttactgaagaatgg

SEQ ID NO: 18826 - DNA, 20 bp, Artificial Sequence
  Target B2M Sequence complement
ttgacttactgaagaatgga

SEQ ID NO: 18827 - DNA, 20 bp, Artificial Sequence
  Target B2M Sequence complement
tgacttactgaagaatggag

SEQ ID NO: 18828 - DNA, 20 bp, Artificial Sequence
  Target B2M Sequence complement
gacttactgaagaatggaga

SEQ ID NO: 18829 - DNA, 20 bp, Artificial Sequence
  Target B2M Sequence complement
acttactgaagaatggagag

SEQ ID NO: 18830 - DNA, 20 bp, Artificial Sequence
  Target B2M Sequence complement
cttactgaagaatggagaga

SEQ ID NO: 18831 - DNA, 20 bp, Artificial Sequence
  Target B2M Sequence complement
ttactgaagaatggagagag

SEQ ID NO: 18832 - DNA, 20 bp, Artificial Sequence
  Target B2M Sequence complement
tactgaagaatggagagaga

SEQ ID NO: 18833 - DNA, 20 bp, Artificial Sequence
  Target B2M Sequence complement
actgaagaatggagagagaa

SEQ ID NO: 18834 - DNA, 20 bp, Artificial Sequence
  Target B2M Sequence complement
ctgaagaatggagagagaat

SEQ ID NO: 18835 - DNA, 20 bp, Artificial Sequence
  Target B2M Sequence complement
tgaagaatggagagagaatt

SEQ ID NO: 18836 - DNA, 20 bp, Artificial Sequence
  Target B2M Sequence complement
gaagaatggagagagaattg

SEQ ID NO: 18837 - DNA, 20 bp, Artificial Sequence
  Target B2M Sequence complement
aagaatggagagagaattga

SEQ ID NO: 18838 - DNA, 20 bp, Artificial Sequence
  Target B2M Sequence complement
agaatggagagagaattgaa

SEQ ID NO: 18839 - DNA, 20 bp, Artificial Sequence
  Target B2M Sequence complement
gaatggagagagaattgaaa

SEQ ID NO: 18840 - DNA, 20 bp, Artificial Sequence
  Target B2M Sequence complement
aaagtggagcattcagactt

SEQ ID NO: 18841 - DNA, 20 bp, Artificial Sequence
  Target B2M Sequence complement
aagtggagcattcagacttg

SEQ ID NO: 18842 - DNA, 20 bp, Artificial Sequence
  Target B2M Sequence complement
agtggagcattcagacttgt

SEQ ID NO: 18843 - DNA, 20 bp, Artificial Sequence
  Target B2M Sequence complement
gtggagcattcagacttgtc

SEQ ID NO: 18844 - DNA, 20 bp, Artificial Sequence
  Target B2M Sequence complement
tggagcattcagacttgtct

SEQ ID NO: 18845 - DNA, 20 bp, Artificial Sequence
  Target B2M Sequence complement
ggagcattcagacttgtctt

SEQ ID NO: 18846 - DNA, 20 bp, Artificial Sequence
  Target B2M Sequence complement
gagcattcagacttgtcttt

SEQ ID NO: 18847 - DNA, 20 bp, Artificial Sequence
  Target B2M Sequence complement
agcattcagacttgtctttc

SEQ ID NO: 18848 - DNA, 20 bp, Artificial Sequence
  Target B2M Sequence complement
gcattcagacttgtctttca

SEQ ID NO: 18849 - DNA, 20 bp, Artificial Sequence
  Target B2M Sequence complement
cattcagacttgtctttcag

SEQ ID NO: 18850 - DNA, 20 bp, Artificial Sequence
  Target B2M Sequence complement
attcagacttgtctttcagc

SEQ ID NO: 18851 - DNA, 20 bp, Artificial Sequence
  Target B2M Sequence complement
ttcagacttgtctttcagca

SEQ ID NO: 18852 - DNA, 20 bp, Artificial Sequence
  Target B2M Sequence complement
tcagacttgtctttcagcaa

SEQ ID NO: 18853 - DNA, 20 bp, Artificial Sequence
  Target B2M Sequence complement
cagacttgtctttcagcaag

SEQ ID NO: 18854 - DNA, 20 bp, Artificial Sequence
  Target B2M Sequence complement
agacttgtctttcagcaagg

SEQ ID NO: 18855 - DNA, 20 bp, Artificial Sequence
  Target B2M Sequence complement
gacttgtctttcagcaagga

SEQ ID NO: 18856 - DNA, 20 bp, Artificial Sequence
  Target B2M Sequence complement
cttgtctttcagcaaggact

SEQ ID NO: 18857 - DNA, 20 bp, Artificial Sequence
  Target B2M Sequence complement
ttgtctttcagcaaggactg

SEQ ID NO: 18858 - DNA, 20 bp, Artificial Sequence
  Target B2M Sequence complement
tgtctttcagcaaggactgg

SEQ ID NO: 18859 - DNA, 20 bp, Artificial Sequence
  Target B2M Sequence complement
gtctttcagcaaggactggt

SEQ ID NO: 18860 - DNA, 20 bp, Artificial Sequence
  Target B2M Sequence complement
tctttcagcaaggactggtc

SEQ ID NO: 18861 - DNA, 20 bp, Artificial Sequence
  Target B2M Sequence complement
ctttcagcaaggactggtct

SEQ ID NO: 18862 - DNA, 20 bp, Artificial Sequence
  Target B2M Sequence complement
tttcagcaaggactggtctt

SEQ ID NO: 18863 - DNA, 20 bp, Artificial Sequence
  Target B2M Sequence complement
ttcagcaaggactggtcttt

SEQ ID NO: 18864 - DNA, 20 bp, Artificial Sequence
  Target B2M Sequence complement
tcagcaaggactggtctttc

SEQ ID NO: 18865 - DNA, 20 bp, Artificial Sequence
  Target B2M Sequence complement
cagcaaggactggtctttct

SEQ ID NO: 18866 - DNA, 20 bp, Artificial Sequence
  Target B2M Sequence complement
agcaaggactggtctttcta

SEQ ID NO: 18867 - DNA, 20 bp, Artificial Sequence
  Target B2M Sequence complement
gcaaggactggtctttctat

SEQ ID NO: 18868 - DNA, 20 bp, Artificial Sequence
  Target B2M Sequence complement
caaggactggtctttctatc

SEQ ID NO: 18869 - DNA, 20 bp, Artificial Sequence
  Target B2M Sequence complement
aaggactggtctttctatct

SEQ ID NO: 18870 - DNA, 20 bp, Artificial Sequence
  Target B2M Sequence complement
aggactggtctttctatctc

SEQ ID NO: 18871 - DNA, 20 bp, Artificial Sequence
  Target B2M Sequence complement
ggactggtctttctatctct

SEQ ID NO: 18872 - DNA, 20 bp, Artificial Sequence
  Target B2M Sequence complement
gactggtctttctatctctt

SEQ ID NO: 18873 - DNA, 20 bp, Artificial Sequence
  Target B2M Sequence complement
actggtctttctatctcttg

SEQ ID NO: 18874 - DNA, 20 bp, Artificial Sequence
  Target B2M Sequence complement
ctggtctttctatctcttgt

SEQ ID NO: 18875 - DNA, 20 bp, Artificial Sequence
  Target B2M Sequence complement
tggtctttctatctcttgta

SEQ ID NO: 18876 - DNA, 20 bp, Artificial Sequence
  Target B2M Sequence complement
ggtctttctatctcttgtac

SEQ ID NO: 18877 - DNA, 20 bp, Artificial Sequence
  Target B2M Sequence complement
gtctttctatctcttgtact

SEQ ID NO: 18878 - DNA, 20 bp, Artificial Sequence
  Target B2M Sequence complement
tctttctatctcttgtacta

SEQ ID NO: 18879 - DNA, 20 bp, Artificial Sequence
  Target B2M Sequence complement
ctttctatctcttgtactac

SEQ ID NO: 18880 - DNA, 20 bp, Artificial Sequence
  Target B2M Sequence complement
tttctatctcttgtactaca

SEQ ID NO: 18881 - DNA, 20 bp, Artificial Sequence
  Target B2M Sequence complement
ttctatctcttgtactacac

SEQ ID NO: 18882 - DNA, 20 bp, Artificial Sequence
  Target B2M Sequence complement
tctatctcttgtactacact

SEQ ID NO: 18883 - DNA, 20 bp, Artificial Sequence
  Target B2M Sequence complement
ctatctcttgtactacactg

SEQ ID NO: 18884 - DNA, 20 bp, Artificial Sequence
  Target B2M Sequence complement
tatctcttgtactacactga

SEQ ID NO: 18885 - DNA, 20 bp, Artificial Sequence
  Target B2M Sequence complement
atctcttgtactacactgaa

SEQ ID NO: 18886 - DNA, 20 bp, Artificial Sequence
  Target B2M Sequence complement
tctcttgtactacactgaat

SEQ ID NO: 18887 - DNA, 20 bp, Artificial Sequence
  Target B2M Sequence complement
ctcttgtactacactgaatt

SEQ ID NO: 18888 - DNA, 20 bp, Artificial Sequence
  Target B2M Sequence complement
tcttgtactacactgaattc

SEQ ID NO: 18889 - DNA, 20 bp, Artificial Sequence
  Target B2M Sequence complement
cttgtactacactgaattca

SEQ ID NO: 18890 - DNA, 20 bp, Artificial Sequence
  Target B2M Sequence complement
ttgtactacactgaattcac

SEQ ID NO: 18891 - DNA, 20 bp, Artificial Sequence
  Target B2M Sequence complement
tgtactacactgaattcacc

SEQ ID NO: 18892 - DNA, 20 bp, Artificial Sequence
  Target B2M Sequence complement
gtactacactgaattcaccc

SEQ ID NO: 18893 - DNA, 20 bp, Artificial Sequence
  Target B2M Sequence complement
aaagatgagtatgcctgccg

SEQ ID NO: 18894 - DNA, 20 bp, Artificial Sequence
  Target B2M Sequence complement
aagatgagtatgcctgccgt

SEQ ID NO: 18895 - DNA, 20 bp, Artificial Sequence
  Target B2M Sequence complement
agatgagtatgcctgccgtg

SEQ ID NO: 18896 - DNA, 20 bp, Artificial Sequence
  Target B2M Sequence complement
gatgagtatgcctgccgtgt

SEQ ID NO: 18897 - DNA, 20 bp, Artificial Sequence
  Target B2M Sequence complement
atgagtatgcctgccgtgtg

SEQ ID NO: 18898 - DNA, 20 bp, Artificial Sequence
  Target B2M Sequence complement
tgagtatgcctgccgtgtga

SEQ ID NO: 18899 - DNA, 20 bp, Artificial Sequence
  Target B2M Sequence complement
gagtatgcctgccgtgtgaa

SEQ ID NO: 18900 - DNA, 20 bp, Artificial Sequence
  Target B2M Sequence complement
agtatgcctgccgtgtgaac

SEQ ID NO: 18901 - DNA, 20 bp, Artificial Sequence
  Target B2M Sequence complement
tatgcctgccgtgtgaacca

SEQ ID NO: 18902 - DNA, 20 bp, Artificial Sequence
  Target B2M Sequence complement
atgcctgccgtgtgaaccat

SEQ ID NO: 18903 - DNA, 20 bp, Artificial Sequence
  Target B2M Sequence complement
ctgccgtgtgaaccatgtga

SEQ ID NO: 18904 - DNA, 20 bp, Artificial Sequence
  Target B2M Sequence complement
tgccgtgtgaaccatgtgac

SEQ ID NO: 18905 - DNA, 20 bp, Artificial Sequence
  Target B2M Sequence complement
gccgtgtgaaccatgtgact

SEQ ID NO: 18906 - DNA, 20 bp, Artificial Sequence
  Target B2M Sequence complement
ccgtgtgaaccatgtgactt

SEQ ID NO: 18907 - DNA, 20 bp, Artificial Sequence
  Target B2M Sequence complement
cgtgtgaaccatgtgacttt

SEQ ID NO: 18908 - DNA, 20 bp, Artificial Sequence
  Target B2M Sequence complement
gtgtgaaccatgtgactttg

SEQ ID NO: 18909 - DNA, 20 bp, Artificial Sequence
  Target B2M Sequence complement
tgtgaaccatgtgactttgt

SEQ ID NO: 18910 - DNA, 20 bp, Artificial Sequence
  Target B2M Sequence complement
gtgaaccatgtgactttgtc

SEQ ID NO: 18911 - DNA, 20 bp, Artificial Sequence
  Target B2M Sequence complement
tgaaccatgtgactttgtca

SEQ ID NO: 18912 - DNA, 20 bp, Artificial Sequence
  Target B2M Sequence complement
gaaccatgtgactttgtcac

SEQ ID NO: 18913 - DNA, 20 bp, Artificial Sequence
  Target B2M Sequence complement
aaccatgtgactttgtcaca

SEQ ID NO: 18914 - DNA, 20 bp, Artificial Sequence
  Target B2M Sequence complement
accatgtgactttgtcacag

SEQ ID NO: 18915 - DNA, 20 bp, Artificial Sequence
  Target B2M Sequence complement
ccatgtgactttgtcacagc

SEQ ID NO: 18916 - DNA, 20 bp, Artificial Sequence
  Target B2M Sequence complement
catgtgactttgtcacagcc

SEQ ID NO: 18917 - DNA, 20 bp, Artificial Sequence
  Target B2M Sequence complement
atgtgactttgtcacagccc

SEQ ID NO: 18918 - DNA, 20 bp, Artificial Sequence
  Target B2M Sequence complement
tgtgactttgtcacagccca

SEQ ID NO: 18919 - DNA, 20 bp, Artificial Sequence
  Target B2M Sequence complement
gtgactttgtcacagcccaa

SEQ ID NO: 18920 - DNA, 20 bp, Artificial Sequence
  Target B2M Sequence complement
tgactttgtcacagcccaag

SEQ ID NO: 18921 - DNA, 20 bp, Artificial Sequence
  Target B2M Sequence complement
gactttgtcacagcccaaga

SEQ ID NO: 18922 - DNA, 20 bp, Artificial Sequence
  Target B2M Sequence complement
actttgtcacagcccaagat

SEQ ID NO: 18923 - DNA, 20 bp, Artificial Sequence
  Target B2M Sequence complement
ctttgtcacagcccaagata

SEQ ID NO: 18924 - DNA, 20 bp, Artificial Sequence
  Target B2M Sequence complement
tttgtcacagcccaagatag

SEQ ID NO: 18925 - DNA, 20 bp, Artificial Sequence
  Target B2M Sequence complement
ttgtcacagcccaagatagt

SEQ ID NO: 18926 - DNA, 20 bp, Artificial Sequence
  Target B2M Sequence complement
tgtcacagcccaagatagtt

SEQ ID NO: 18927 - DNA, 20 bp, Artificial Sequence
  Target B2M Sequence complement
gtcacagcccaagatagtta

SEQ ID NO: 18928 - DNA, 20 bp, Artificial Sequence
  Target B2M Sequence complement
tcacagcccaagatagttaa

SEQ ID NO: 18929 - DNA, 20 bp, Artificial Sequence
  Target B2M Sequence complement
cagcccaagatagttaagtg

SEQ ID NO: 18930 - DNA, 20 bp, Artificial Sequence
  Target B2M Sequence complement
agcccaagatagttaagtgg

SEQ ID NO: 18931 - DNA, 20 bp, Artificial Sequence
  Target B2M Sequence complement
gcccaagatagttaagtggg

SEQ ID NO: 18932 - DNA, 20 bp, Artificial Sequence
  Target B2M Sequence complement
cccaagatagttaagtggga

SEQ ID NO: 18933 - DNA, 20 bp, Artificial Sequence
  Target B2M Sequence complement
ccaagatagttaagtgggat

SEQ ID NO: 18934 - DNA, 20 bp, Artificial Sequence
  Target B2M Sequence complement
caagatagttaagtgggatc

SEQ ID NO: 18935 - DNA, 20 bp, Artificial Sequence
  Target B2M Sequence complement
aagatagttaagtgggatcg

SEQ ID NO: 18936 - DNA, 20 bp, Artificial Sequence
  Target B2M Sequence complement
agatagttaagtgggatcga

SEQ ID NO: 18937 - DNA, 20 bp, Artificial Sequence
  Target B2M Sequence complement
gatagttaagtgggatcgag

SEQ ID NO: 18938 - DNA, 20 bp, Artificial Sequence
  Target B2M Sequence complement
atagttaagtgggatcgaga

SEQ ID NO: 18939 - DNA, 20 bp, Artificial Sequence
  Target B2M Sequence complement
tagttaagtgggatcgagac

SEQ ID NO: 18940 - DNA, 20 bp, Artificial Sequence
  Target B2M Sequence complement
agttaagtgggatcgagaca

SEQ ID NO: 18941 - DNA, 20 bp, Artificial Sequence
  Target B2M Sequence complement
gttaagtgggatcgagacat

SEQ ID NO: 18942 - DNA, 20 bp, Artificial Sequence
  Target B2M Sequence complement
ttaagtgggatcgagacatg

SEQ ID NO: 18943 - DNA, 20 bp, Artificial Sequence
  Target B2M Sequence complement
taagtgggatcgagacatgt

SEQ ID NO: 18944 - DNA, 20 bp, Artificial Sequence
  Target B2M Sequence complement
aagtgggatcgagacatgta

SEQ ID NO: 18945 - DNA, 20 bp, Artificial Sequence
  Target B2M Sequence complement
agtgggatcgagacatgtaa

SEQ ID NO: 18946 - DNA, 20 bp, Artificial Sequence
  Target B2M Sequence complement
gtgggatcgagacatgtaag

SEQ ID NO: 18947 - DNA, 20 bp, Artificial Sequence
  Target B2M Sequence complement
tgggatcgagacatgtaagc

SEQ ID NO: 18948 - DNA, 20 bp, Artificial Sequence
  Target B2M Sequence complement
gggatcgagacatgtaagca

SEQ ID NO: 18949 - DNA, 20 bp, Artificial Sequence
  Target B2M Sequence complement
ggatcgagacatgtaagcag

SEQ ID NO: 18950 - DNA, 20 bp, Artificial Sequence
  Target B2M Sequence complement
gatcgagacatgtaagcagc

SEQ ID NO: 18951 - DNA, 20 bp, Artificial Sequence
  Target B2M Sequence complement
atcgagacatgtaagcagca

SEQ ID NO: 18952 - DNA, 20 bp, Artificial Sequence
  Target B2M Sequence complement
tcgagacatgtaagcagcat

SEQ ID NO: 18953 - DNA, 20 bp, Artificial Sequence
  Target B2M Sequence complement
cgagacatgtaagcagcatc

SEQ ID NO: 18954 - DNA, 20 bp, Artificial Sequence
  Target B2M Sequence complement
agacatgtaagcagcatcat

SEQ ID NO: 18955 - DNA, 20 bp, Artificial Sequence
  Target B2M Sequence complement
gacatgtaagcagcatcatg

SEQ ID NO: 18956 - DNA, 20 bp, Artificial Sequence
  Target B2M Sequence complement
catgtaagcagcatcatgga

SEQ ID NO: 18957 - DNA, 20 bp, Artificial Sequence
  Target B2M Sequence complement
atgtaagcagcatcatggag

SEQ ID NO: 18958 - DNA, 20 bp, Artificial Sequence
  Target B2M Sequence complement
tgtaagcagcatcatggagg

SEQ ID NO: 18959 - DNA, 20 bp, Artificial Sequence
  Target B2M Sequence complement
gtaagcagcatcatggaggt

SEQ ID NO: 18960 - DNA, 20 bp, Artificial Sequence
  Target B2M Sequence complement
taagcagcatcatggaggtt

SEQ ID NO: 18961 - DNA, 20 bp, Artificial Sequence
  Target B2M Sequence complement
aagcagcatcatggaggttt

SEQ ID NO: 18962 - DNA, 20 bp, Artificial Sequence
  Target B2M Sequence complement
agcagcatcatggaggtttg

SEQ ID NO: 18963 - DNA, 20 bp, Artificial Sequence
  Target B2M Sequence complement
gcagcatcatggaggtttga

SEQ ID NO: 18964 - DNA, 20 bp, Artificial Sequence
  Target B2M Sequence complement
cagcatcatggaggtttgaa

SEQ ID NO: 18965 - DNA, 20 bp, Artificial Sequence
  Target B2M Sequence complement
agcatcatggaggtttgaag

SEQ ID NO: 18966 - DNA, 20 bp, Artificial Sequence
  Target B2M Sequence complement
gcatcatggaggtttgaaga

SEQ ID NO: 18967 - DNA, 20 bp, Artificial Sequence
  Target B2M Sequence complement
catcatggaggtttgaagat

SEQ ID NO: 18968 - DNA, 20 bp, Artificial Sequence
  Target B2M Sequence complement
atcatggaggtttgaagatg

SEQ ID NO: 18969 - DNA, 20 bp, Artificial Sequence
  Target B2M Sequence complement
tcatggaggtttgaagatgc

SEQ ID NO: 18970 - DNA, 20 bp, Artificial Sequence
  Target B2M Sequence complement
catggaggtttgaagatgcc

SEQ ID NO: 18971 - DNA, 20 bp, Artificial Sequence
  Target B2M Sequence complement
atggaggtttgaagatgccg

SEQ ID NO: 18972 - DNA, 20 bp, Artificial Sequence
  Target B2M Sequence complement
tggaggtttgaagatgccgc

SEQ ID NO: 18973 - DNA, 20 bp, Artificial Sequence
  Target B2M Sequence complement
ggaggtttgaagatgccgca

SEQ ID NO: 18974 - DNA, 20 bp, Artificial Sequence
  Target B2M Sequence complement
gaggtttgaagatgccgcat

SEQ ID NO: 18975 - DNA, 20 bp, Artificial Sequence
  Target B2M Sequence complement
aggtttgaagatgccgcatt

SEQ ID NO: 18976 - DNA, 20 bp, Artificial Sequence
  Target B2M Sequence complement
ggtttgaagatgccgcattt

SEQ ID NO: 18977 - DNA, 20 bp, Artificial Sequence
  Target B2M Sequence complement
gtttgaagatgccgcatttg

SEQ ID NO: 18978 - DNA, 20 bp, Artificial Sequence
  Target B2M Sequence complement
tttgaagatgccgcatttgg

SEQ ID NO: 18979 - DNA, 20 bp, Artificial Sequence
  Target B2M Sequence complement
ttgaagatgccgcatttgga

SEQ ID NO: 18980 - DNA, 20 bp, Artificial Sequence
  Target B2M Sequence complement
tgaagatgccgcatttggat

SEQ ID NO: 18981 - DNA, 20 bp, Artificial Sequence
  Target B2M Sequence complement
gaagatgccgcatttggatt

SEQ ID NO: 18982 - DNA, 20 bp, Artificial Sequence
  Target B2M Sequence complement
aagatgccgcatttggattg

SEQ ID NO: 18983 - DNA, 20 bp, Artificial Sequence
  Target B2M Sequence complement
agatgccgcatttggattgg

SEQ ID NO: 18984 - DNA, 20 bp, Artificial Sequence
  Target B2M Sequence complement
gatgccgcatttggattgga

SEQ ID NO: 18985 - DNA, 20 bp, Artificial Sequence
  Target B2M Sequence complement
atgccgcatttggattggat

SEQ ID NO: 18986 - DNA, 20 bp, Artificial Sequence
  Target B2M Sequence complement
tgccgcatttggattggatg

SEQ ID NO: 18987 - DNA, 20 bp, Artificial Sequence
  Target B2M Sequence complement
gccgcatttggattggatga

SEQ ID NO: 18988 - DNA, 20 bp, Artificial Sequence
  Target B2M Sequence complement
ccgcatttggattggatgaa

SEQ ID NO: 18989 - DNA, 20 bp, Artificial Sequence
  Target B2M Sequence complement
cgcatttggattggatgaat

SEQ ID NO: 18990 - DNA, 20 bp, Artificial Sequence
  Target B2M Sequence complement
gcatttggattggatgaatt

SEQ ID NO: 18991 - DNA, 20 bp, Artificial Sequence
  Target B2M Sequence complement
catttggattggatgaattc

SEQ ID NO: 18992 - DNA, 20 bp, Artificial Sequence
  Target B2M Sequence complement
atttggattggatgaattcc

SEQ ID NO: 18993 - DNA, 20 bp, Artificial Sequence
  Target B2M Sequence complement
tttggattggatgaattcca

SEQ ID NO: 18994 - DNA, 20 bp, Artificial Sequence
  Target B2M Sequence complement
ttggattggatgaattccaa

SEQ ID NO: 18995 - DNA, 20 bp, Artificial Sequence
  Target B2M Sequence complement
tggattggatgaattccaaa

SEQ ID NO: 18996 - DNA, 20 bp, Artificial Sequence
  Target B2M Sequence complement
ggattggatgaattccaaat

SEQ ID NO: 18997 - DNA, 20 bp, Artificial Sequence
  Target B2M Sequence complement
gattggatgaattccaaatt

SEQ ID NO: 18998 - DNA, 20 bp, Artificial Sequence
  Target B2M Sequence complement
attggatgaattccaaattc

SEQ ID NO: 18999 - DNA, 20 bp, Artificial Sequence
  Target B2M Sequence complement
ttggatgaattccaaattct

SEQ ID NO: 19000 - DNA, 20 bp, Artificial Sequence
  Target B2M Sequence complement
tggatgaattccaaattctg

SEQ ID NO: 19001 - DNA, 20 bp, Artificial Sequence
  Target B2M Sequence complement
ggatgaattccaaattctgc

SEQ ID NO: 19002 - DNA, 20 bp, Artificial Sequence
  Target B2M Sequence complement
gatgaattccaaattctgct

SEQ ID NO: 19003 - DNA, 20 bp, Artificial Sequence
  Target B2M Sequence complement
atgaattccaaattctgctt

SEQ ID NO: 19004 - DNA, 20 bp, Artificial Sequence
  Target B2M Sequence complement
tgaattccaaattctgcttg

SEQ ID NO: 19005 - DNA, 20 bp, Artificial Sequence
  Target B2M Sequence complement
gaattccaaattctgcttgc

SEQ ID NO: 19006 - DNA, 20 bp, Artificial Sequence
  Target B2M Sequence complement
aattccaaattctgcttgct

SEQ ID NO: 19007 - DNA, 20 bp, Artificial Sequence
  Target B2M Sequence complement
attccaaattctgcttgctt

SEQ ID NO: 19008 - DNA, 20 bp, Artificial Sequence
  Target B2M Sequence complement
ttccaaattctgcttgcttg

SEQ ID NO: 19009 - DNA, 20 bp, Artificial Sequence
  Target B2M Sequence complement
tccaaattctgcttgcttgc

SEQ ID NO: 19010 - DNA, 20 bp, Artificial Sequence
  Target B2M Sequence complement
ccaaattctgcttgcttgct

SEQ ID NO: 19011 - DNA, 20 bp, Artificial Sequence
  Target B2M Sequence complement
caaattctgcttgcttgctt

SEQ ID NO: 19012 - DNA, 20 bp, Artificial Sequence
  Target B2M Sequence complement
aaattctgcttgcttgcttt

SEQ ID NO: 19013 - DNA, 20 bp, Artificial Sequence
  Target B2M Sequence complement
atattgatatgcttatacac

SEQ ID NO: 19014 - DNA, 20 bp, Artificial Sequence
  Target B2M Sequence complement
tattgatatgcttatacact

SEQ ID NO: 19015 - DNA, 20 bp, Artificial Sequence
  Target B2M Sequence complement
attgatatgcttatacactt

SEQ ID NO: 19016 - DNA, 20 bp, Artificial Sequence
  Target B2M Sequence complement
ttgatatgcttatacactta

SEQ ID NO: 19017 - DNA, 20 bp, Artificial Sequence
  Target B2M Sequence complement
tgatatgcttatacacttac

SEQ ID NO: 19018 - DNA, 20 bp, Artificial Sequence
  Target B2M Sequence complement
gatatgcttatacacttaca

SEQ ID NO: 19019 - DNA, 20 bp, Artificial Sequence
  Target B2M Sequence complement
atatgcttatacacttacac

SEQ ID NO: 19020 - DNA, 20 bp, Artificial Sequence
  Target B2M Sequence complement
tatgcttatacacttacact

SEQ ID NO: 19021 - DNA, 20 bp, Artificial Sequence
  Target B2M Sequence complement
atgcttatacacttacactt

SEQ ID NO: 19022 - DNA, 20 bp, Artificial Sequence
  Target B2M Sequence complement
tgcttatacacttacacttt

SEQ ID NO: 19023 - DNA, 20 bp, Artificial Sequence
  Target B2M Sequence complement
gcttatacacttacacttta

SEQ ID NO: 19024 - DNA, 20 bp, Artificial Sequence
  Target B2M Sequence complement
cttatacacttacactttat

SEQ ID NO: 19025 - DNA, 20 bp, Artificial Sequence
  Target B2M Sequence complement
ttatacacttacactttatg

SEQ ID NO: 19026 - DNA, 20 bp, Artificial Sequence
  Target B2M Sequence complement
tatacacttacactttatgc

SEQ ID NO: 19027 - DNA, 20 bp, Artificial Sequence
  Target B2M Sequence complement
atacacttacactttatgca

SEQ ID NO: 19028 - DNA, 20 bp, Artificial Sequence
  Target B2M Sequence complement
tacacttacactttatgcac

SEQ ID NO: 19029 - DNA, 20 bp, Artificial Sequence
  Target B2M Sequence complement
acacttacactttatgcaca

SEQ ID NO: 19030 - DNA, 20 bp, Artificial Sequence
  Target B2M Sequence complement
cacttacactttatgcacaa

SEQ ID NO: 19031 - DNA, 20 bp, Artificial Sequence
  Target B2M Sequence complement
acttacactttatgcacaaa

SEQ ID NO: 19032 - DNA, 20 bp, Artificial Sequence
  Target B2M Sequence complement
aatgtagggttataataatg

SEQ ID NO: 19033 - DNA, 20 bp, Artificial Sequence
  Target B2M Sequence complement
atgtagggttataataatgt

SEQ ID NO: 19034 - DNA, 20 bp, Artificial Sequence
  Target B2M Sequence complement
tgtagggttataataatgtt

SEQ ID NO: 19035 - DNA, 20 bp, Artificial Sequence
  Target B2M Sequence complement
gtagggttataataatgtta

SEQ ID NO: 19036 - DNA, 20 bp, Artificial Sequence
  Target B2M Sequence complement
agggttataataatgttaac

SEQ ID NO: 19037 - DNA, 20 bp, Artificial Sequence
  Target B2M Sequence complement
gggttataataatgttaaca

SEQ ID NO: 19038 - DNA, 20 bp, Artificial Sequence
  Target B2M Sequence complement
ataataatgttaacatggac

SEQ ID NO: 19039 - DNA, 20 bp, Artificial Sequence
  Target B2M Sequence complement
taataatgttaacatggaca

SEQ ID NO: 19040 - DNA, 20 bp, Artificial Sequence
  Target B2M Sequence complement
aataatgttaacatggacat

SEQ ID NO: 19041 - DNA, 20 bp, Artificial Sequence
  Target B2M Sequence complement
ataatgttaacatggacatg

SEQ ID NO: 19042 - DNA, 20 bp, Artificial Sequence
  Target B2M Sequence complement
taatgttaacatggacatga

SEQ ID NO: 19043 - DNA, 20 bp, Artificial Sequence
  Target B2M Sequence complement
aatgttaacatggacatgat

SEQ ID NO: 19044 - DNA, 20 bp, Artificial Sequence
  Target B2M Sequence complement
atgttaacatggacatgatc

SEQ ID NO: 19045 - DNA, 20 bp, Artificial Sequence
  Target B2M Sequence complement
tgttaacatggacatgatct

SEQ ID NO: 19046 - DNA, 20 bp, Artificial Sequence
  Target B2M Sequence complement
gttaacatggacatgatctt

SEQ ID NO: 19047 - DNA, 20 bp, Artificial Sequence
  Target B2M Sequence complement
ttaacatggacatgatcttc

SEQ ID NO: 19048 - DNA, 20 bp, Artificial Sequence
  Target B2M Sequence complement
taacatggacatgatcttct

SEQ ID NO: 19049 - DNA, 20 bp, Artificial Sequence
  Target B2M Sequence complement
aacatggacatgatcttctt

SEQ ID NO: 19050 - DNA, 20 bp, Artificial Sequence
  Target B2M Sequence complement
acatggacatgatcttcttt

SEQ ID NO: 19051 - DNA, 20 bp, Artificial Sequence
  Target B2M Sequence complement
catggacatgatcttcttta

SEQ ID NO: 19052 - DNA, 20 bp, Artificial Sequence
  Target B2M Sequence complement
atggacatgatcttctttat

SEQ ID NO: 19053 - DNA, 20 bp, Artificial Sequence
  Target B2M Sequence complement
tggacatgatcttctttata

SEQ ID NO: 19054 - DNA, 20 bp, Artificial Sequence
  Target B2M Sequence complement
ggacatgatcttctttataa

SEQ ID NO: 19055 - DNA, 20 bp, Artificial Sequence
  Target B2M Sequence complement
gacatgatcttctttataat

SEQ ID NO: 19056 - DNA, 20 bp, Artificial Sequence
  Target B2M Sequence complement
catgatcttctttataattc

SEQ ID NO: 19057 - DNA, 20 bp, Artificial Sequence
  Target B2M Sequence complement
gatcttctttataattctac

SEQ ID NO: 19058 - DNA, 20 bp, Artificial Sequence
  Target B2M Sequence complement
ctttataattctactttgag

SEQ ID NO: 19059 - DNA, 20 bp, Artificial Sequence
  Target B2M Sequence complement
ttataattctactttgagtg

SEQ ID NO: 19060 - DNA, 20 bp, Artificial Sequence
  Target B2M Sequence complement
tataattctactttgagtgc

SEQ ID NO: 19061 - DNA, 20 bp, Artificial Sequence
  Target B2M Sequence complement
ataattctactttgagtgct

SEQ ID NO: 19062 - DNA, 20 bp, Artificial Sequence
  Target B2M Sequence complement
taattctactttgagtgctg

SEQ ID NO: 19063 - DNA, 20 bp, Artificial Sequence
  Target B2M Sequence complement
aattctactttgagtgctgt

SEQ ID NO: 19064 - DNA, 20 bp, Artificial Sequence
  Target B2M Sequence complement
attctactttgagtgctgtc

SEQ ID NO: 19065 - DNA, 20 bp, Artificial Sequence
  Target B2M Sequence complement
ttctactttgagtgctgtct

SEQ ID NO: 19066 - DNA, 20 bp, Artificial Sequence
  Target B2M Sequence complement
tctactttgagtgctgtctc

SEQ ID NO: 19067 - DNA, 20 bp, Artificial Sequence
  Target B2M Sequence complement
ctactttgagtgctgtctcc

SEQ ID NO: 19068 - DNA, 20 bp, Artificial Sequence
  Target B2M Sequence complement
tactttgagtgctgtctcca

SEQ ID NO: 19069 - DNA, 20 bp, Artificial Sequence
  Target B2M Sequence complement
actttgagtgctgtctccat

SEQ ID NO: 19070 - DNA, 20 bp, Artificial Sequence
  Target B2M Sequence complement
ctttgagtgctgtctccatg

SEQ ID NO: 19071 - DNA, 20 bp, Artificial Sequence
  Target B2M Sequence complement
tttgagtgctgtctccatgt

SEQ ID NO: 19072 - DNA, 20 bp, Artificial Sequence
  Target B2M Sequence complement
ttgagtgctgtctccatgtt

SEQ ID NO: 19073 - DNA, 20 bp, Artificial Sequence
  Target B2M Sequence complement
tgagtgctgtctccatgttt

SEQ ID NO: 19074 - DNA, 20 bp, Artificial Sequence
  Target B2M Sequence complement
gagtgctgtctccatgtttg

SEQ ID NO: 19075 - DNA, 20 bp, Artificial Sequence
  Target B2M Sequence complement
agtgctgtctccatgtttga

SEQ ID NO: 19076 - DNA, 20 bp, Artificial Sequence
  Target B2M Sequence complement
gtgctgtctccatgtttgat

SEQ ID NO: 19077 - DNA, 20 bp, Artificial Sequence
  Target B2M Sequence complement
tgctgtctccatgtttgatg

SEQ ID NO: 19078 - DNA, 20 bp, Artificial Sequence
  Target B2M Sequence complement
gctgtctccatgtttgatgt

SEQ ID NO: 19079 - DNA, 20 bp, Artificial Sequence
  Target B2M Sequence complement
ctgtctccatgtttgatgta

SEQ ID NO: 19080 - DNA, 20 bp, Artificial Sequence
  Target B2M Sequence complement
tgtctccatgtttgatgtat

SEQ ID NO: 19081 - DNA, 20 bp, Artificial Sequence
  Target B2M Sequence complement
gtctccatgtttgatgtatc

SEQ ID NO: 19082 - DNA, 20 bp, Artificial Sequence
  Target B2M Sequence complement
tctccatgtttgatgtatct

SEQ ID NO: 19083 - DNA, 20 bp, Artificial Sequence
  Target B2M Sequence complement
ctccatgtttgatgtatctg

SEQ ID NO: 19084 - DNA, 20 bp, Artificial Sequence
  Target B2M Sequence complement
tccatgtttgatgtatctga

SEQ ID NO: 19085 - DNA, 20 bp, Artificial Sequence
  Target B2M Sequence complement
ccatgtttgatgtatctgag

SEQ ID NO: 19086 - DNA, 20 bp, Artificial Sequence
  Target B2M Sequence complement
catgtttgatgtatctgagc

SEQ ID NO: 19087 - DNA, 20 bp, Artificial Sequence
  Target B2M Sequence complement
atgtttgatgtatctgagca

SEQ ID NO: 19088 - DNA, 20 bp, Artificial Sequence
  Target B2M Sequence complement
tgtttgatgtatctgagcag

SEQ ID NO: 19089 - DNA, 20 bp, Artificial Sequence
  Target B2M Sequence complement
gtttgatgtatctgagcagg

SEQ ID NO: 19090 - DNA, 20 bp, Artificial Sequence
  Target B2M Sequence complement
tttgatgtatctgagcaggt

SEQ ID NO: 19091 - DNA, 20 bp, Artificial Sequence
  Target B2M Sequence complement
ttgatgtatctgagcaggtt

SEQ ID NO: 19092 - DNA, 20 bp, Artificial Sequence
  Target B2M Sequence complement
tgatgtatctgagcaggttg

SEQ ID NO: 19093 - DNA, 20 bp, Artificial Sequence
  Target B2M Sequence complement
gatgtatctgagcaggttgc

SEQ ID NO: 19094 - DNA, 20 bp, Artificial Sequence
  Target B2M Sequence complement
atgtatctgagcaggttgct

SEQ ID NO: 19095 - DNA, 20 bp, Artificial Sequence
  Target B2M Sequence complement
tgtatctgagcaggttgctc

SEQ ID NO: 19096 - DNA, 20 bp, Artificial Sequence
  Target B2M Sequence complement
gtatctgagcaggttgctcc

SEQ ID NO: 19097 - DNA, 20 bp, Artificial Sequence
  Target B2M Sequence complement
tatctgagcaggttgctcca

SEQ ID NO: 19098 - DNA, 20 bp, Artificial Sequence
  Target B2M Sequence complement
atctgagcaggttgctccac

SEQ ID NO: 19099 - DNA, 20 bp, Artificial Sequence
  Target B2M Sequence complement
tctgagcaggttgctccaca

SEQ ID NO: 19100 - DNA, 20 bp, Artificial Sequence
  Target B2M Sequence complement
agcaggttgctccacaggta

SEQ ID NO: 19101 - DNA, 20 bp, Artificial Sequence
  Target B2M Sequence complement
aggttgctccacaggtagct

SEQ ID NO: 19102 - DNA, 20 bp, Artificial Sequence
  Target B2M Sequence complement
gttgctccacaggtagctct

SEQ ID NO: 19103 - DNA, 20 bp, Artificial Sequence
  Target B2M Sequence complement
ttgctccacaggtagctcta

SEQ ID NO: 19104 - DNA, 20 bp, Artificial Sequence
  Target B2M Sequence complement
tgctccacaggtagctctag

SEQ ID NO: 19105 - DNA, 20 bp, Artificial Sequence
  Target B2M Sequence complement
ctccacaggtagctctagga

SEQ ID NO: 19106 - DNA, 20 bp, Artificial Sequence
  Target B2M Sequence complement
tccacaggtagctctaggag

SEQ ID NO: 19107 - DNA, 20 bp, Artificial Sequence
  Target B2M Sequence complement
tctaggagggctggcaactt

SEQ ID NO: 19108 - DNA, 20 bp, Artificial Sequence
  Target B2M Sequence complement
ctaggagggctggcaactta

SEQ ID NO: 19109 - DNA, 20 bp, Artificial Sequence
  Target B2M Sequence complement
taggagggctggcaacttag

SEQ ID NO: 19110 - DNA, 20 bp, Artificial Sequence
  Target B2M Sequence complement
aggagggctggcaacttaga

SEQ ID NO: 19111 - DNA, 20 bp, Artificial Sequence
  Target B2M Sequence complement
agggctggcaacttagaggt

SEQ ID NO: 19112 - DNA, 20 bp, Artificial Sequence
  Target B2M Sequence complement
gggagcagagaattctctta

SEQ ID NO: 19113 - DNA, 20 bp, Artificial Sequence
  Target B2M Sequence complement
ggagcagagaattctcttat

SEQ ID NO: 19114 - DNA, 20 bp, Artificial Sequence
  Target B2M Sequence complement
gagcagagaattctcttatc

SEQ ID NO: 19115 - DNA, 20 bp, Artificial Sequence
  Target B2M Sequence complement
agcagagaattctcttatcc

SEQ ID NO: 19116 - DNA, 20 bp, Artificial Sequence
  Target B2M Sequence complement
gcagagaattctcttatcca

SEQ ID NO: 19117 - DNA, 20 bp, Artificial Sequence
  Target B2M Sequence complement
cagagaattctcttatccaa

SEQ ID NO: 19118 - DNA, 20 bp, Artificial Sequence
  Target B2M Sequence complement
agagaattctcttatccaac

SEQ ID NO: 19119 - DNA, 20 bp, Artificial Sequence
  Target B2M Sequence complement
gagaattctcttatccaaca

SEQ ID NO: 19120 - DNA, 20 bp, Artificial Sequence
  Target B2M Sequence complement
agaattctcttatccaacat

SEQ ID NO: 19121 - DNA, 20 bp, Artificial Sequence
  Target B2M Sequence complement
gaattctcttatccaacatc

SEQ ID NO: 19122 - DNA, 20 bp, Artificial Sequence
  Target B2M Sequence complement
aattctcttatccaacatca

SEQ ID NO: 19123 - DNA, 20 bp, Artificial Sequence
  Target B2M Sequence complement
attctcttatccaacatcaa

SEQ ID NO: 19124 - DNA, 20 bp, Artificial Sequence
  Target B2M Sequence complement
ttctcttatccaacatcaac

SEQ ID NO: 19125 - DNA, 20 bp, Artificial Sequence
  Target B2M Sequence complement
tctcttatccaacatcaaca

SEQ ID NO: 19126 - DNA, 20 bp, Artificial Sequence
  Target B2M Sequence complement
ctcttatccaacatcaacat

SEQ ID NO: 19127 - DNA, 20 bp, Artificial Sequence
  Target B2M Sequence complement
tcttatccaacatcaacatc

SEQ ID NO: 19128 - DNA, 20 bp, Artificial Sequence
  Target B2M Sequence complement
cttatccaacatcaacatct

SEQ ID NO: 19129 - DNA, 20 bp, Artificial Sequence
  Target B2M Sequence complement
ttatccaacatcaacatctt

SEQ ID NO: 19130 - DNA, 20 bp, Artificial Sequence
  Target B2M Sequence complement
tatccaacatcaacatcttg

SEQ ID NO: 19131 - DNA, 20 bp, Artificial Sequence
  Target B2M Sequence complement
atccaacatcaacatcttgg

SEQ ID NO: 19132 - DNA, 20 bp, Artificial Sequence
  Target B2M Sequence complement
tccaacatcaacatcttggt

SEQ ID NO: 19133 - DNA, 20 bp, Artificial Sequence
  Target B2M Sequence complement
ccaacatcaacatcttggtc

SEQ ID NO: 19134 - DNA, 20 bp, Artificial Sequence
  Target B2M Sequence complement
caacatcaacatcttggtca

SEQ ID NO: 19135 - DNA, 20 bp, Artificial Sequence
  Target B2M Sequence complement
aacatcaacatcttggtcag

SEQ ID NO: 19136 - DNA, 20 bp, Artificial Sequence
  Target B2M Sequence complement
acatcaacatcttggtcaga

SEQ ID NO: 19137 - DNA, 20 bp, Artificial Sequence
  Target B2M Sequence complement
catcaacatcttggtcagat

SEQ ID NO: 19138 - DNA, 20 bp, Artificial Sequence
  Target B2M Sequence complement
atcaacatcttggtcagatt

SEQ ID NO: 19139 - DNA, 20 bp, Artificial Sequence
  Target B2M Sequence complement
tcaacatcttggtcagattt

SEQ ID NO: 19140 - DNA, 20 bp, Artificial Sequence
  Target B2M Sequence complement
caacatcttggtcagatttg

SEQ ID NO: 19141 - DNA, 20 bp, Artificial Sequence
  Target B2M Sequence complement
aacatcttggtcagatttga

SEQ ID NO: 19142 - DNA, 20 bp, Artificial Sequence
  Target B2M Sequence complement
acatcttggtcagatttgaa

SEQ ID NO: 19143 - DNA, 20 bp, Artificial Sequence
  Target B2M Sequence complement
catcttggtcagatttgaac

SEQ ID NO: 19144 - DNA, 20 bp, Artificial Sequence
  Target B2M Sequence complement
atcttggtcagatttgaact

SEQ ID NO: 19145 - DNA, 20 bp, Artificial Sequence
  Target B2M Sequence complement
tcttggtcagatttgaactc

SEQ ID NO: 19146 - DNA, 20 bp, Artificial Sequence
  Target B2M Sequence complement
cttggtcagatttgaactct

SEQ ID NO: 19147 - DNA, 20 bp, Artificial Sequence
  Target B2M Sequence complement
ttggtcagatttgaactctt

SEQ ID NO: 19148 - DNA, 20 bp, Artificial Sequence
  Target B2M Sequence complement
tggtcagatttgaactcttc

SEQ ID NO: 19149 - DNA, 20 bp, Artificial Sequence
  Target B2M Sequence complement
ggtcagatttgaactcttca

SEQ ID NO: 19150 - DNA, 20 bp, Artificial Sequence
  Target B2M Sequence complement
gtcagatttgaactcttcaa

SEQ ID NO: 19151 - DNA, 20 bp, Artificial Sequence
  Target B2M Sequence complement
tcagatttgaactcttcaat

SEQ ID NO: 19152 - DNA, 20 bp, Artificial Sequence
  Target B2M Sequence complement
cagatttgaactcttcaatc

SEQ ID NO: 19153 - DNA, 20 bp, Artificial Sequence
  Target B2M Sequence complement
agatttgaactcttcaatct

SEQ ID NO: 19154 - DNA, 20 bp, Artificial Sequence
  Target B2M Sequence complement
gatttgaactcttcaatctc

SEQ ID NO: 19155 - DNA, 20 bp, Artificial Sequence
  Target B2M Sequence complement
atttgaactcttcaatctct

SEQ ID NO: 19156 - DNA, 20 bp, Artificial Sequence
  Target B2M Sequence complement
tttgaactcttcaatctctt

SEQ ID NO: 19157 - DNA, 20 bp, Artificial Sequence
  Target B2M Sequence complement
ttgaactcttcaatctcttg

SEQ ID NO: 19158 - DNA, 20 bp, Artificial Sequence
  Target B2M Sequence complement
tgaactcttcaatctcttgc

SEQ ID NO: 19159 - DNA, 20 bp, Artificial Sequence
  Target B2M Sequence complement
gaactcttcaatctcttgca

SEQ ID NO: 19160 - DNA, 20 bp, Artificial Sequence
  Target B2M Sequence complement
aactcttcaatctcttgcac

SEQ ID NO: 19161 - DNA, 20 bp, Artificial Sequence
  Target B2M Sequence complement
actcttcaatctcttgcact

SEQ ID NO: 19162 - DNA, 20 bp, Artificial Sequence
  Target B2M Sequence complement
ctcttcaatctcttgcactc

SEQ ID NO: 19163 - DNA, 20 bp, Artificial Sequence
  Target B2M Sequence complement
tcttcaatctcttgcactca

SEQ ID NO: 19164 - DNA, 20 bp, Artificial Sequence
  Target B2M Sequence complement
cttcaatctcttgcactcaa

SEQ ID NO: 19165 - DNA, 20 bp, Artificial Sequence
  Target B2M Sequence complement
ttcaatctcttgcactcaaa

SEQ ID NO: 19166 - DNA, 20 bp, Artificial Sequence
  Target B2M Sequence complement
tcaatctcttgcactcaaag

SEQ ID NO: 19167 - DNA, 20 bp, Artificial Sequence
  Target B2M Sequence complement
caatctcttgcactcaaagc

SEQ ID NO: 19168 - DNA, 20 bp, Artificial Sequence
  Target B2M Sequence complement
aatctcttgcactcaaagct

SEQ ID NO: 19169 - DNA, 20 bp, Artificial Sequence
  Target B2M Sequence complement
atctcttgcactcaaagctt

SEQ ID NO: 19170 - DNA, 20 bp, Artificial Sequence
  Target B2M Sequence complement
tctcttgcactcaaagcttg

SEQ ID NO: 19171 - DNA, 20 bp, Artificial Sequence
  Target B2M Sequence complement
ctcttgcactcaaagcttgt

SEQ ID NO: 19172 - DNA, 20 bp, Artificial Sequence
  Target B2M Sequence complement
tcttgcactcaaagcttgtt

SEQ ID NO: 19173 - DNA, 20 bp, Artificial Sequence
  Target B2M Sequence complement
cttgcactcaaagcttgtta

SEQ ID NO: 19174 - DNA, 20 bp, Artificial Sequence
  Target B2M Sequence complement
ttgcactcaaagcttgttaa

SEQ ID NO: 19175 - DNA, 20 bp, Artificial Sequence
  Target B2M Sequence complement
tgcactcaaagcttgttaag

SEQ ID NO: 19176 - DNA, 20 bp, Artificial Sequence
  Target B2M Sequence complement
gcactcaaagcttgttaaga

SEQ ID NO: 19177 - DNA, 20 bp, Artificial Sequence
  Target B2M Sequence complement
cactcaaagcttgttaagat

SEQ ID NO: 19178 - DNA, 20 bp, Artificial Sequence
  Target B2M Sequence complement
actcaaagcttgttaagata

SEQ ID NO: 19179 - DNA, 20 bp, Artificial Sequence
  Target B2M Sequence complement
ctcaaagcttgttaagatag

SEQ ID NO: 19180 - DNA, 20 bp, Artificial Sequence
  Target B2M Sequence complement
tcaaagcttgttaagatagt

SEQ ID NO: 19181 - DNA, 20 bp, Artificial Sequence
  Target B2M Sequence complement
caaagcttgttaagatagtt

SEQ ID NO: 19182 - DNA, 20 bp, Artificial Sequence
  Target B2M Sequence complement
aaagcttgttaagatagtta

SEQ ID NO: 19183 - DNA, 20 bp, Artificial Sequence
  Target B2M Sequence complement
aagcttgttaagatagttaa

SEQ ID NO: 19184 - DNA, 20 bp, Artificial Sequence
  Target B2M Sequence complement
agcttgttaagatagttaag

SEQ ID NO: 19185 - DNA, 20 bp, Artificial Sequence
  Target B2M Sequence complement
gcttgttaagatagttaagc

SEQ ID NO: 19186 - DNA, 20 bp, Artificial Sequence
  Target B2M Sequence complement
cttgttaagatagttaagcg

SEQ ID NO: 19187 - DNA, 20 bp, Artificial Sequence
  Target B2M Sequence complement
ttgttaagatagttaagcgt

SEQ ID NO: 19188 - DNA, 20 bp, Artificial Sequence
  Target B2M Sequence complement
tgttaagatagttaagcgtg

SEQ ID NO: 19189 - DNA, 20 bp, Artificial Sequence
  Target B2M Sequence complement
gttaagatagttaagcgtgc

SEQ ID NO: 19190 - DNA, 20 bp, Artificial Sequence
  Target B2M Sequence complement
ttaagatagttaagcgtgca

SEQ ID NO: 19191 - DNA, 20 bp, Artificial Sequence
  Target B2M Sequence complement
taagatagttaagcgtgcat

SEQ ID NO: 19192 - DNA, 20 bp, Artificial Sequence
  Target B2M Sequence complement
aagatagttaagcgtgcata

SEQ ID NO: 19193 - DNA, 20 bp, Artificial Sequence
  Target B2M Sequence complement
agatagttaagcgtgcataa

SEQ ID NO: 19194 - DNA, 20 bp, Artificial Sequence
  Target B2M Sequence complement
gatagttaagcgtgcataag

SEQ ID NO: 19195 - DNA, 20 bp, Artificial Sequence
  Target B2M Sequence complement
atagttaagcgtgcataagt

SEQ ID NO: 19196 - DNA, 20 bp, Artificial Sequence
  Target B2M Sequence complement
tagttaagcgtgcataagtt

SEQ ID NO: 19197 - DNA, 20 bp, Artificial Sequence
  Target B2M Sequence complement
agttaagcgtgcataagtta

SEQ ID NO: 19198 - DNA, 20 bp, Artificial Sequence
  Target B2M Sequence complement
gttaagcgtgcataagttaa

SEQ ID NO: 19199 - DNA, 20 bp, Artificial Sequence
  Target B2M Sequence complement
ttaagcgtgcataagttaac

SEQ ID NO: 19200 - DNA, 20 bp, Artificial Sequence
  Target B2M Sequence complement
taagcgtgcataagttaact

SEQ ID NO: 19201 - DNA, 20 bp, Artificial Sequence
  Target B2M Sequence complement
aagcgtgcataagttaactt

SEQ ID NO: 19202 - DNA, 20 bp, Artificial Sequence
  Target B2M Sequence complement
agcgtgcataagttaacttc

SEQ ID NO: 19203 - DNA, 20 bp, Artificial Sequence
  Target B2M Sequence complement
gcgtgcataagttaacttcc

SEQ ID NO: 19204 - DNA, 20 bp, Artificial Sequence
  Target B2M Sequence complement
cgtgcataagttaacttcca

SEQ ID NO: 19205 - DNA, 20 bp, Artificial Sequence
  Target B2M Sequence complement
gtgcataagttaacttccaa

SEQ ID NO: 19206 - DNA, 20 bp, Artificial Sequence
  Target B2M Sequence complement
tgcataagttaacttccaat

SEQ ID NO: 19207 - DNA, 20 bp, Artificial Sequence
  Target B2M Sequence complement
gcataagttaacttccaatt

SEQ ID NO: 19208 - DNA, 20 bp, Artificial Sequence
  Target B2M Sequence complement
cataagttaacttccaattt

SEQ ID NO: 19209 - DNA, 20 bp, Artificial Sequence
  Target B2M Sequence complement
taagttaacttccaatttac

SEQ ID NO: 19210 - DNA, 20 bp, Artificial Sequence
  Target B2M Sequence complement
aagttaacttccaatttaca

SEQ ID NO: 19211 - DNA, 20 bp, Artificial Sequence
  Target B2M Sequence complement
agttaacttccaatttacat

SEQ ID NO: 19212 - DNA, 20 bp, Artificial Sequence
  Target B2M Sequence complement
gttaacttccaatttacata

SEQ ID NO: 19213 - DNA, 20 bp, Artificial Sequence
  Target B2M Sequence complement
ttaacttccaatttacatac

SEQ ID NO: 19214 - DNA, 20 bp, Artificial Sequence
  Target B2M Sequence complement
taacttccaatttacatact

SEQ ID NO: 19215 - DNA, 20 bp, Artificial Sequence
  Target B2M Sequence complement
aacttccaatttacatactc

SEQ ID NO: 19216 - DNA, 20 bp, Artificial Sequence
  Target B2M Sequence complement
acttccaatttacatactct

SEQ ID NO: 19217 - DNA, 20 bp, Artificial Sequence
  Target B2M Sequence complement
cttccaatttacatactctg

SEQ ID NO: 19218 - DNA, 20 bp, Artificial Sequence
  Target B2M Sequence complement
ttccaatttacatactctgc

SEQ ID NO: 19219 - DNA, 20 bp, Artificial Sequence
  Target B2M Sequence complement
tccaatttacatactctgct

SEQ ID NO: 19220 - DNA, 20 bp, Artificial Sequence
  Target B2M Sequence complement
ccaatttacatactctgctt

SEQ ID NO: 19221 - DNA, 20 bp, Artificial Sequence
  Target B2M Sequence complement
caatttacatactctgctta

SEQ ID NO: 19222 - DNA, 20 bp, Artificial Sequence
  Target B2M Sequence complement
aatttacatactctgcttag

SEQ ID NO: 19223 - DNA, 20 bp, Artificial Sequence
  Target B2M Sequence complement
atttacatactctgcttaga

SEQ ID NO: 19224 - DNA, 20 bp, Artificial Sequence
  Target B2M Sequence complement
tttacatactctgcttagaa

SEQ ID NO: 19225 - DNA, 20 bp, Artificial Sequence
  Target B2M Sequence complement
ttacatactctgcttagaat

SEQ ID NO: 19226 - DNA, 20 bp, Artificial Sequence
  Target B2M Sequence complement
tacatactctgcttagaatt

SEQ ID NO: 19227 - DNA, 20 bp, Artificial Sequence
  Target B2M Sequence complement
acatactctgcttagaattt

SEQ ID NO: 19228 - DNA, 20 bp, Artificial Sequence
  Target B2M Sequence complement
catactctgcttagaatttg

SEQ ID NO: 19229 - DNA, 20 bp, Artificial Sequence
  Target B2M Sequence complement
atactctgcttagaatttgg

SEQ ID NO: 19230 - DNA, 20 bp, Artificial Sequence
  Target B2M Sequence complement
tactctgcttagaatttggg

SEQ ID NO: 19231 - DNA, 20 bp, Artificial Sequence
  Target B2M Sequence complement
ttagaaatataattgacagg

SEQ ID NO: 19232 - DNA, 20 bp, Artificial Sequence
  Target B2M Sequence complement
tagaaatataattgacagga

SEQ ID NO: 19233 - DNA, 20 bp, Artificial Sequence
  Target B2M Sequence complement
agaaatataattgacaggat

SEQ ID NO: 19234 - DNA, 20 bp, Artificial Sequence
  Target B2M Sequence complement
gaaatataattgacaggatt

SEQ ID NO: 19235 - DNA, 20 bp, Artificial Sequence
  Target B2M Sequence complement
tataattgacaggattattg

SEQ ID NO: 19236 - DNA, 20 bp, Artificial Sequence
  Target B2M Sequence complement
ataattgacaggattattgg

SEQ ID NO: 19237 - DNA, 20 bp, Artificial Sequence
  Target B2M Sequence complement
taattgacaggattattgga

SEQ ID NO: 19238 - DNA, 20 bp, Artificial Sequence
  Target B2M Sequence complement
aattgacaggattattggaa

SEQ ID NO: 19239 - DNA, 20 bp, Artificial Sequence
  Target B2M Sequence complement
attgacaggattattggaaa

SEQ ID NO: 19240 - DNA, 20 bp, Artificial Sequence
  Target B2M Sequence complement
ttgacaggattattggaaat

SEQ ID NO: 19241 - DNA, 20 bp, Artificial Sequence
  Target B2M Sequence complement
tgacaggattattggaaatt

SEQ ID NO: 19242 - DNA, 20 bp, Artificial Sequence
  Target B2M Sequence complement
gacaggattattggaaattt

SEQ ID NO: 19243 - DNA, 20 bp, Artificial Sequence
  Target B2M Sequence complement
acaggattattggaaatttg

SEQ ID NO: 19244 - DNA, 20 bp, Artificial Sequence
  Target B2M Sequence complement
caggattattggaaatttgt

SEQ ID NO: 19245 - DNA, 20 bp, Artificial Sequence
  Target B2M Sequence complement
aggattattggaaatttgtt

SEQ ID NO: 19246 - DNA, 20 bp, Artificial Sequence
  Target B2M Sequence complement
ggattattggaaatttgtta

SEQ ID NO: 19247 - DNA, 20 bp, Artificial Sequence
  Target B2M Sequence complement
atacatttgataaagtaagg

SEQ ID NO: 19248 - DNA, 20 bp, Artificial Sequence
  Target B2M Sequence complement
tacatttgataaagtaaggc

SEQ ID NO: 19249 - DNA, 20 bp, Artificial Sequence
  Target B2M Sequence complement
acatttgataaagtaaggca

SEQ ID NO: 19250 - DNA, 20 bp, Artificial Sequence
  Target B2M Sequence complement
catttgataaagtaaggcat

SEQ ID NO: 19251 - DNA, 20 bp, Artificial Sequence
  Target B2M Sequence complement
atttgataaagtaaggcatg

SEQ ID NO: 19252 - DNA, 20 bp, Artificial Sequence
  Target B2M Sequence complement
tttgataaagtaaggcatgg

SEQ ID NO: 19253 - DNA, 20 bp, Artificial Sequence
  Target B2M Sequence complement
ttgataaagtaaggcatggt

SEQ ID NO: 19254 - DNA, 20 bp, Artificial Sequence
  Target B2M Sequence complement
tgataaagtaaggcatggtt

SEQ ID NO: 19255 - DNA, 20 bp, Artificial Sequence
  Target B2M Sequence complement
gataaagtaaggcatggttg

SEQ ID NO: 19256 - DNA, 20 bp, Artificial Sequence
  Target B2M Sequence complement
ataaagtaaggcatggttgt

SEQ ID NO: 19257 - DNA, 20 bp, Artificial Sequence
  Target B2M Sequence complement
taaagtaaggcatggttgtg

SEQ ID NO: 19258 - DNA, 20 bp, Artificial Sequence
  Target B2M Sequence complement
aaagtaaggcatggttgtgg

SEQ ID NO: 19259 - DNA, 20 bp, Artificial Sequence
  Target B2M Sequence complement
aagtaaggcatggttgtggt

SEQ ID NO: 19260 - DNA, 20 bp, Artificial Sequence
  Target B2M Sequence complement
agtaaggcatggttgtggtt

SEQ ID NO: 19261 - DNA, 20 bp, Artificial Sequence
  Target B2M Sequence complement
gtaaggcatggttgtggtta

SEQ ID NO: 19262 - DNA, 20 bp, Artificial Sequence
  Target B2M Sequence complement
taaggcatggttgtggttaa

SEQ ID NO: 19263 - DNA, 20 bp, Artificial Sequence
  Target B2M Sequence complement
aaggcatggttgtggttaat

SEQ ID NO: 19264 - DNA, 20 bp, Artificial Sequence
  Target B2M Sequence complement
aggcatggttgtggttaatc

SEQ ID NO: 19265 - DNA, 20 bp, Artificial Sequence
  Target B2M Sequence complement
ggcatggttgtggttaatct

SEQ ID NO: 19266 - DNA, 20 bp, Artificial Sequence
  Target B2M Sequence complement
gcatggttgtggttaatctg

SEQ ID NO: 19267 - DNA, 20 bp, Artificial Sequence
  Target B2M Sequence complement
catggttgtggttaatctgg

SEQ ID NO: 19268 - DNA, 20 bp, Artificial Sequence
  Target B2M Sequence complement
atggttgtggttaatctggt

SEQ ID NO: 19269 - DNA, 20 bp, Artificial Sequence
  Target B2M Sequence complement
tggttgtggttaatctggtt

SEQ ID NO: 19270 - DNA, 20 bp, Artificial Sequence
  Target B2M Sequence complement
ggttgtggttaatctggttt

SEQ ID NO: 19271 - DNA, 20 bp, Artificial Sequence
  Target B2M Sequence complement
gttgtggttaatctggttta

SEQ ID NO: 19272 - DNA, 20 bp, Artificial Sequence
  Target B2M Sequence complement
ttgtggttaatctggtttat

SEQ ID NO: 19273 - DNA, 20 bp, Artificial Sequence
  Target B2M Sequence complement
tgtggttaatctggtttatt

SEQ ID NO: 19274 - DNA, 20 bp, Artificial Sequence
  Target B2M Sequence complement
gtggttaatctggtttattt

SEQ ID NO: 19275 - DNA, 20 bp, Artificial Sequence
  Target B2M Sequence complement
tttgttccacaagttaaata

SEQ ID NO: 19276 - DNA, 20 bp, Artificial Sequence
  Target B2M Sequence complement
ttgttccacaagttaaataa

SEQ ID NO: 19277 - DNA, 20 bp, Artificial Sequence
  Target B2M Sequence complement
tgttccacaagttaaataaa

SEQ ID NO: 19278 - DNA, 20 bp, Artificial Sequence
  Target B2M Sequence complement
gttccacaagttaaataaat

SEQ ID NO: 19279 - DNA, 20 bp, Artificial Sequence
  Target B2M Sequence complement
ttccacaagttaaataaatc

SEQ ID NO: 19280 - DNA, 20 bp, Artificial Sequence
  Target B2M Sequence complement
tccacaagttaaataaatca

SEQ ID NO: 19281 - DNA, 20 bp, Artificial Sequence
  Target B2M Sequence complement
ccacaagttaaataaatcat

SEQ ID NO: 19282 - DNA, 22 bp, Artificial Sequence
  Target B2M Sequence complement
attcctgaagctgacagcattc

SEQ ID NO: 19283 - DNA, 22 bp, Artificial Sequence
  Target B2M Sequence complement
ttcctgaagctgacagcattcg

SEQ ID NO: 19284 - DNA, 22 bp, Artificial Sequence
  Target B2M Sequence complement
tcctgaagctgacagcattcgg

SEQ ID NO: 19285 - DNA, 22 bp, Artificial Sequence
  Target B2M Sequence complement
cctgaagctgacagcattcggg

SEQ ID NO: 19286 - DNA, 22 bp, Artificial Sequence
  Target B2M Sequence complement
ctgaagctgacagcattcgggc

SEQ ID NO: 19287 - DNA, 22 bp, Artificial Sequence
  Target B2M Sequence complement
tgaagctgacagcattcgggcc

SEQ ID NO: 19288 - DNA, 22 bp, Artificial Sequence
  Target B2M Sequence complement
agatgtctcgctccgtggcctt

SEQ ID NO: 19289 - DNA, 22 bp, Artificial Sequence
  Target B2M Sequence complement
gatgtctcgctccgtggcctta

SEQ ID NO: 19290 - DNA, 22 bp, Artificial Sequence
  Target B2M Sequence complement
atgtctcgctccgtggccttag

SEQ ID NO: 19291 - DNA, 22 bp, Artificial Sequence
  Target B2M Sequence complement
ccttagctgtgctcgcgctact

SEQ ID NO: 19292 - DNA, 22 bp, Artificial Sequence
  Target B2M Sequence complement
cttagctgtgctcgcgctactc

SEQ ID NO: 19293 - DNA, 22 bp, Artificial Sequence
  Target B2M Sequence complement
ttagctgtgctcgcgctactct

SEQ ID NO: 19294 - DNA, 22 bp, Artificial Sequence
  Target B2M Sequence complement
tagctgtgctcgcgctactctc

SEQ ID NO: 19295 - DNA, 22 bp, Artificial Sequence
  Target B2M Sequence complement
agctgtgctcgcgctactctct

SEQ ID NO: 19296 - DNA, 22 bp, Artificial Sequence
  Target B2M Sequence complement
ctgtgctcgcgctactctctct

SEQ ID NO: 19297 - DNA, 22 bp, Artificial Sequence
  Target B2M Sequence complement
tgtgctcgcgctactctctctt

SEQ ID NO: 19298 - DNA, 22 bp, Artificial Sequence
  Target B2M Sequence complement
gtgctcgcgctactctctcttt

SEQ ID NO: 19299 - DNA, 22 bp, Artificial Sequence
  Target B2M Sequence complement
tgctcgcgctactctctctttc

SEQ ID NO: 19300 - DNA, 22 bp, Artificial Sequence
  Target B2M Sequence complement
gctcgcgctactctctctttct

SEQ ID NO: 19301 - DNA, 22 bp, Artificial Sequence
  Target B2M Sequence complement
ctcgcgctactctctctttctg

SEQ ID NO: 19302 - DNA, 22 bp, Artificial Sequence
  Target B2M Sequence complement
tcgcgctactctctctttctgg

SEQ ID NO: 19303 - DNA, 22 bp, Artificial Sequence
  Target B2M Sequence complement
cgcgctactctctctttctggc

SEQ ID NO: 19304 - DNA, 22 bp, Artificial Sequence
  Target B2M Sequence complement
gcgctactctctctttctggcc

SEQ ID NO: 19305 - DNA, 22 bp, Artificial Sequence
  Target B2M Sequence complement
cgctactctctctttctggcct

SEQ ID NO: 19306 - DNA, 22 bp, Artificial Sequence
  Target B2M Sequence complement
gctactctctctttctggcctg

SEQ ID NO: 19307 - DNA, 22 bp, Artificial Sequence
  Target B2M Sequence complement
ctactctctctttctggcctgg

SEQ ID NO: 19308 - DNA, 22 bp, Artificial Sequence
  Target B2M Sequence complement
tactctctctttctggcctgga

SEQ ID NO: 19309 - DNA, 22 bp, Artificial Sequence
  Target B2M Sequence complement
actctctctttctggcctggag

SEQ ID NO: 19310 - DNA, 22 bp, Artificial Sequence
  Target B2M Sequence complement
ctctctctttctggcctggagg

SEQ ID NO: 19311 - DNA, 22 bp, Artificial Sequence
  Target B2M Sequence complement
tctctctttctggcctggaggc

SEQ ID NO: 19312 - DNA, 22 bp, Artificial Sequence
  Target B2M Sequence complement
ctctctttctggcctggaggct

SEQ ID NO: 19313 - DNA, 22 bp, Artificial Sequence
  Target B2M Sequence complement
tctctttctggcctggaggcta

SEQ ID NO: 19314 - DNA, 22 bp, Artificial Sequence
  Target B2M Sequence complement
ctctttctggcctggaggctat

SEQ ID NO: 19315 - DNA, 22 bp, Artificial Sequence
  Target B2M Sequence complement
tctttctggcctggaggctatc

SEQ ID NO: 19316 - DNA, 22 bp, Artificial Sequence
  Target B2M Sequence complement
ctttctggcctggaggctatcc

SEQ ID NO: 19317 - DNA, 22 bp, Artificial Sequence
  Target B2M Sequence complement
tttctggcctggaggctatcca

SEQ ID NO: 19318 - DNA, 22 bp, Artificial Sequence
  Target B2M Sequence complement
ttctggcctggaggctatccag

SEQ ID NO: 19319 - DNA, 22 bp, Artificial Sequence
  Target B2M Sequence complement
cctggaggctatccagcgtact

SEQ ID NO: 19320 - DNA, 22 bp, Artificial Sequence
  Target B2M Sequence complement
ctggaggctatccagcgtactc

SEQ ID NO: 19321 - DNA, 22 bp, Artificial Sequence
  Target B2M Sequence complement
tggaggctatccagcgtactcc

SEQ ID NO: 19322 - DNA, 22 bp, Artificial Sequence
  Target B2M Sequence complement
ggaggctatccagcgtactcca

SEQ ID NO: 19323 - DNA, 22 bp, Artificial Sequence
  Target B2M Sequence complement
gaggctatccagcgtactccaa

SEQ ID NO: 19324 - DNA, 22 bp, Artificial Sequence
  Target B2M Sequence complement
aggctatccagcgtactccaaa

SEQ ID NO: 19325 - DNA, 22 bp, Artificial Sequence
  Target B2M Sequence complement
ggctatccagcgtactccaaag

SEQ ID NO: 19326 - DNA, 22 bp, Artificial Sequence
  Target B2M Sequence complement
gctatccagcgtactccaaaga

SEQ ID NO: 19327 - DNA, 22 bp, Artificial Sequence
  Target B2M Sequence complement
ctatccagcgtactccaaagat

SEQ ID NO: 19328 - DNA, 22 bp, Artificial Sequence
  Target B2M Sequence complement
tatccagcgtactccaaagatt

SEQ ID NO: 19329 - DNA, 22 bp, Artificial Sequence
  Target B2M Sequence complement
atccagcgtactccaaagattc

SEQ ID NO: 19330 - DNA, 22 bp, Artificial Sequence
  Target B2M Sequence complement
tccagcgtactccaaagattca

SEQ ID NO: 19331 - DNA, 22 bp, Artificial Sequence
  Target B2M Sequence complement
ccagcgtactccaaagattcag

SEQ ID NO: 19332 - DNA, 22 bp, Artificial Sequence
  Target B2M Sequence complement
cagcgtactccaaagattcagg

SEQ ID NO: 19333 - DNA, 22 bp, Artificial Sequence
  Target B2M Sequence complement
agcgtactccaaagattcaggt

SEQ ID NO: 19334 - DNA, 22 bp, Artificial Sequence
  Target B2M Sequence complement
gcgtactccaaagattcaggtt

SEQ ID NO: 19335 - DNA, 22 bp, Artificial Sequence
  Target B2M Sequence complement
cgtactccaaagattcaggttt

SEQ ID NO: 19336 - DNA, 22 bp, Artificial Sequence
  Target B2M Sequence complement
gtactccaaagattcaggttta

SEQ ID NO: 19337 - DNA, 22 bp, Artificial Sequence
  Target B2M Sequence complement
tactccaaagattcaggtttac

SEQ ID NO: 19338 - DNA, 22 bp, Artificial Sequence
  Target B2M Sequence complement
actccaaagattcaggtttact

SEQ ID NO: 19339 - DNA, 22 bp, Artificial Sequence
  Target B2M Sequence complement
ctccaaagattcaggtttactc

SEQ ID NO: 19340 - DNA, 22 bp, Artificial Sequence
  Target B2M Sequence complement
tccaaagattcaggtttactca

SEQ ID NO: 19341 - DNA, 22 bp, Artificial Sequence
  Target B2M Sequence complement
ccaaagattcaggtttactcac

SEQ ID NO: 19342 - DNA, 22 bp, Artificial Sequence
  Target B2M Sequence complement
caaagattcaggtttactcacg

SEQ ID NO: 19343 - DNA, 22 bp, Artificial Sequence
  Target B2M Sequence complement
aaagattcaggtttactcacgt

SEQ ID NO: 19344 - DNA, 22 bp, Artificial Sequence
  Target B2M Sequence complement
aagattcaggtttactcacgtc

SEQ ID NO: 19345 - DNA, 22 bp, Artificial Sequence
  Target B2M Sequence complement
agattcaggtttactcacgtca

SEQ ID NO: 19346 - DNA, 22 bp, Artificial Sequence
  Target B2M Sequence complement
gattcaggtttactcacgtcat

SEQ ID NO: 19347 - DNA, 22 bp, Artificial Sequence
  Target B2M Sequence complement
attcaggtttactcacgtcatc

SEQ ID NO: 19348 - DNA, 22 bp, Artificial Sequence
  Target B2M Sequence complement
ttcaggtttactcacgtcatcc

SEQ ID NO: 19349 - DNA, 22 bp, Artificial Sequence
  Target B2M Sequence complement
tcaggtttactcacgtcatcca

SEQ ID NO: 19350 - DNA, 22 bp, Artificial Sequence
  Target B2M Sequence complement
caggtttactcacgtcatccag

SEQ ID NO: 19351 - DNA, 22 bp, Artificial Sequence
  Target B2M Sequence complement
aggtttactcacgtcatccagc

SEQ ID NO: 19352 - DNA, 22 bp, Artificial Sequence
  Target B2M Sequence complement
ggtttactcacgtcatccagca

SEQ ID NO: 19353 - DNA, 22 bp, Artificial Sequence
  Target B2M Sequence complement
gtttactcacgtcatccagcag

SEQ ID NO: 19354 - DNA, 22 bp, Artificial Sequence
  Target B2M Sequence complement
tttactcacgtcatccagcaga

SEQ ID NO: 19355 - DNA, 22 bp, Artificial Sequence
  Target B2M Sequence complement
ttactcacgtcatccagcagag

SEQ ID NO: 19356 - DNA, 22 bp, Artificial Sequence
  Target B2M Sequence complement
tactcacgtcatccagcagaga

SEQ ID NO: 19357 - DNA, 22 bp, Artificial Sequence
  Target B2M Sequence complement
actcacgtcatccagcagagaa

SEQ ID NO: 19358 - DNA, 22 bp, Artificial Sequence
  Target B2M Sequence complement
ctcacgtcatccagcagagaat

SEQ ID NO: 19359 - DNA, 22 bp, Artificial Sequence
  Target B2M Sequence complement
tcacgtcatccagcagagaatg

SEQ ID NO: 19360 - DNA, 22 bp, Artificial Sequence
  Target B2M Sequence complement
cacgtcatccagcagagaatgg

SEQ ID NO: 19361 - DNA, 22 bp, Artificial Sequence
  Target B2M Sequence complement
acgtcatccagcagagaatgga

SEQ ID NO: 19362 - DNA, 22 bp, Artificial Sequence
  Target B2M Sequence complement
cgtcatccagcagagaatggaa

SEQ ID NO: 19363 - DNA, 22 bp, Artificial Sequence
  Target B2M Sequence complement
gtcatccagcagagaatggaaa

SEQ ID NO: 19364 - DNA, 22 bp, Artificial Sequence
  Target B2M Sequence complement
tcatccagcagagaatggaaag

SEQ ID NO: 19365 - DNA, 22 bp, Artificial Sequence
  Target B2M Sequence complement
catccagcagagaatggaaagt

SEQ ID NO: 19366 - DNA, 22 bp, Artificial Sequence
  Target B2M Sequence complement
atccagcagagaatggaaagtc

SEQ ID NO: 19367 - DNA, 22 bp, Artificial Sequence
  Target B2M Sequence complement
tccagcagagaatggaaagtca

SEQ ID NO: 19368 - DNA, 22 bp, Artificial Sequence
  Target B2M Sequence complement
ccagcagagaatggaaagtcaa

SEQ ID NO: 19369 - DNA, 22 bp, Artificial Sequence
  Target B2M Sequence complement
cagcagagaatggaaagtcaaa

SEQ ID NO: 19370 - DNA, 22 bp, Artificial Sequence
  Target B2M Sequence complement
agcagagaatggaaagtcaaat

SEQ ID NO: 19371 - DNA, 22 bp, Artificial Sequence
  Target B2M Sequence complement
gcagagaatggaaagtcaaatt

SEQ ID NO: 19372 - DNA, 22 bp, Artificial Sequence
  Target B2M Sequence complement
cagagaatggaaagtcaaattt

SEQ ID NO: 19373 - DNA, 22 bp, Artificial Sequence
  Target B2M Sequence complement
agagaatggaaagtcaaatttc

SEQ ID NO: 19374 - DNA, 22 bp, Artificial Sequence
  Target B2M Sequence complement
gagaatggaaagtcaaatttcc

SEQ ID NO: 19375 - DNA, 22 bp, Artificial Sequence
  Target B2M Sequence complement
agaatggaaagtcaaatttcct

SEQ ID NO: 19376 - DNA, 22 bp, Artificial Sequence
  Target B2M Sequence complement
gaatggaaagtcaaatttcctg

SEQ ID NO: 19377 - DNA, 22 bp, Artificial Sequence
  Target B2M Sequence complement
aatggaaagtcaaatttcctga

SEQ ID NO: 19378 - DNA, 22 bp, Artificial Sequence
  Target B2M Sequence complement
atggaaagtcaaatttcctgaa

SEQ ID NO: 19379 - DNA, 22 bp, Artificial Sequence
  Target B2M Sequence complement
tggaaagtcaaatttcctgaat

SEQ ID NO: 19380 - DNA, 22 bp, Artificial Sequence
  Target B2M Sequence complement
ggaaagtcaaatttcctgaatt

SEQ ID NO: 19381 - DNA, 22 bp, Artificial Sequence
  Target B2M Sequence complement
gaaagtcaaatttcctgaattg

SEQ ID NO: 19382 - DNA, 22 bp, Artificial Sequence
  Target B2M Sequence complement
aaagtcaaatttcctgaattgc

SEQ ID NO: 19383 - DNA, 22 bp, Artificial Sequence
  Target B2M Sequence complement
aagtcaaatttcctgaattgct

SEQ ID NO: 19384 - DNA, 22 bp, Artificial Sequence
  Target B2M Sequence complement
agtcaaatttcctgaattgcta

SEQ ID NO: 19385 - DNA, 22 bp, Artificial Sequence
  Target B2M Sequence complement
gtcaaatttcctgaattgctat

SEQ ID NO: 19386 - DNA, 22 bp, Artificial Sequence
  Target B2M Sequence complement
tcaaatttcctgaattgctatg

SEQ ID NO: 19387 - DNA, 22 bp, Artificial Sequence
  Target B2M Sequence complement
caaatttcctgaattgctatgt

SEQ ID NO: 19388 - DNA, 22 bp, Artificial Sequence
  Target B2M Sequence complement
aaatttcctgaattgctatgtg

SEQ ID NO: 19389 - DNA, 22 bp, Artificial Sequence
  Target B2M Sequence complement
aatttcctgaattgctatgtgt

SEQ ID NO: 19390 - DNA, 22 bp, Artificial Sequence
  Target B2M Sequence complement
atttcctgaattgctatgtgtc

SEQ ID NO: 19391 - DNA, 22 bp, Artificial Sequence
  Target B2M Sequence complement
tttcctgaattgctatgtgtct

SEQ ID NO: 19392 - DNA, 22 bp, Artificial Sequence
  Target B2M Sequence complement
ttcctgaattgctatgtgtctg

SEQ ID NO: 19393 - DNA, 22 bp, Artificial Sequence
  Target B2M Sequence complement
tcctgaattgctatgtgtctgg

SEQ ID NO: 19394 - DNA, 22 bp, Artificial Sequence
  Target B2M Sequence complement
cctgaattgctatgtgtctggg

SEQ ID NO: 19395 - DNA, 22 bp, Artificial Sequence
  Target B2M Sequence complement
ctgaattgctatgtgtctgggt

SEQ ID NO: 19396 - DNA, 22 bp, Artificial Sequence
  Target B2M Sequence complement
tgaattgctatgtgtctgggtt

SEQ ID NO: 19397 - DNA, 22 bp, Artificial Sequence
  Target B2M Sequence complement
gaattgctatgtgtctgggttt

SEQ ID NO: 19398 - DNA, 22 bp, Artificial Sequence
  Target B2M Sequence complement
aattgctatgtgtctgggtttc

SEQ ID NO: 19399 - DNA, 22 bp, Artificial Sequence
  Target B2M Sequence complement
attgctatgtgtctgggtttca

SEQ ID NO: 19400 - DNA, 22 bp, Artificial Sequence
  Target B2M Sequence complement
ttgctatgtgtctgggtttcat

SEQ ID NO: 19401 - DNA, 22 bp, Artificial Sequence
  Target B2M Sequence complement
tgctatgtgtctgggtttcatc

SEQ ID NO: 19402 - DNA, 22 bp, Artificial Sequence
  Target B2M Sequence complement
gctatgtgtctgggtttcatcc

SEQ ID NO: 19403 - DNA, 22 bp, Artificial Sequence
  Target B2M Sequence complement
ctatgtgtctgggtttcatcca

SEQ ID NO: 19404 - DNA, 22 bp, Artificial Sequence
  Target B2M Sequence complement
tatgtgtctgggtttcatccat

SEQ ID NO: 19405 - DNA, 22 bp, Artificial Sequence
  Target B2M Sequence complement
atgtgtctgggtttcatccatc

SEQ ID NO: 19406 - DNA, 22 bp, Artificial Sequence
  Target B2M Sequence complement
tgtgtctgggtttcatccatcc

SEQ ID NO: 19407 - DNA, 22 bp, Artificial Sequence
  Target B2M Sequence complement
gtgtctgggtttcatccatccg

SEQ ID NO: 19408 - DNA, 22 bp, Artificial Sequence
  Target B2M Sequence complement
tgtctgggtttcatccatccga

SEQ ID NO: 19409 - DNA, 22 bp, Artificial Sequence
  Target B2M Sequence complement
gtctgggtttcatccatccgac

SEQ ID NO: 19410 - DNA, 22 bp, Artificial Sequence
  Target B2M Sequence complement
tctgggtttcatccatccgaca

SEQ ID NO: 19411 - DNA, 22 bp, Artificial Sequence
  Target B2M Sequence complement
ctgggtttcatccatccgacat

SEQ ID NO: 19412 - DNA, 22 bp, Artificial Sequence
  Target B2M Sequence complement
tgggtttcatccatccgacatt

SEQ ID NO: 19413 - DNA, 22 bp, Artificial Sequence
  Target B2M Sequence complement
gggtttcatccatccgacattg

SEQ ID NO: 19414 - DNA, 22 bp, Artificial Sequence
  Target B2M Sequence complement
ggtttcatccatccgacattga

SEQ ID NO: 19415 - DNA, 22 bp, Artificial Sequence
  Target B2M Sequence complement
gtttcatccatccgacattgaa

SEQ ID NO: 19416 - DNA, 22 bp, Artificial Sequence
  Target B2M Sequence complement
tttcatccatccgacattgaag

SEQ ID NO: 19417 - DNA, 22 bp, Artificial Sequence
  Target B2M Sequence complement
ttcatccatccgacattgaagt

SEQ ID NO: 19418 - DNA, 22 bp, Artificial Sequence
  Target B2M Sequence complement
tcatccatccgacattgaagtt

SEQ ID NO: 19419 - DNA, 22 bp, Artificial Sequence
  Target B2M Sequence complement
catccatccgacattgaagttg

SEQ ID NO: 19420 - DNA, 22 bp, Artificial Sequence
  Target B2M Sequence complement
atccatccgacattgaagttga

SEQ ID NO: 19421 - DNA, 22 bp, Artificial Sequence
  Target B2M Sequence complement
tccatccgacattgaagttgac

SEQ ID NO: 19422 - DNA, 22 bp, Artificial Sequence
  Target B2M Sequence complement
ccatccgacattgaagttgact

SEQ ID NO: 19423 - DNA, 22 bp, Artificial Sequence
  Target B2M Sequence complement
catccgacattgaagttgactt

SEQ ID NO: 19424 - DNA, 22 bp, Artificial Sequence
  Target B2M Sequence complement
atccgacattgaagttgactta

SEQ ID NO: 19425 - DNA, 22 bp, Artificial Sequence
  Target B2M Sequence complement
tccgacattgaagttgacttac

SEQ ID NO: 19426 - DNA, 22 bp, Artificial Sequence
  Target B2M Sequence complement
ccgacattgaagttgacttact

SEQ ID NO: 19427 - DNA, 22 bp, Artificial Sequence
  Target B2M Sequence complement
cgacattgaagttgacttactg

SEQ ID NO: 19428 - DNA, 22 bp, Artificial Sequence
  Target B2M Sequence complement
gacattgaagttgacttactga

SEQ ID NO: 19429 - DNA, 22 bp, Artificial Sequence
  Target B2M Sequence complement
acattgaagttgacttactgaa

SEQ ID NO: 19430 - DNA, 22 bp, Artificial Sequence
  Target B2M Sequence complement
cattgaagttgacttactgaag

SEQ ID NO: 19431 - DNA, 22 bp, Artificial Sequence
  Target B2M Sequence complement
attgaagttgacttactgaaga

SEQ ID NO: 19432 - DNA, 22 bp, Artificial Sequence
  Target B2M Sequence complement
ttgaagttgacttactgaagaa

SEQ ID NO: 19433 - DNA, 22 bp, Artificial Sequence
  Target B2M Sequence complement
tgaagttgacttactgaagaat

SEQ ID NO: 19434 - DNA, 22 bp, Artificial Sequence
  Target B2M Sequence complement
gaagttgacttactgaagaatg

SEQ ID NO: 19435 - DNA, 22 bp, Artificial Sequence
  Target B2M Sequence complement
aagttgacttactgaagaatgg

SEQ ID NO: 19436 - DNA, 22 bp, Artificial Sequence
  Target B2M Sequence complement
agttgacttactgaagaatgga

SEQ ID NO: 19437 - DNA, 22 bp, Artificial Sequence
  Target B2M Sequence complement
gttgacttactgaagaatggag

SEQ ID NO: 19438 - DNA, 22 bp, Artificial Sequence
  Target B2M Sequence complement
ttgacttactgaagaatggaga

SEQ ID NO: 19439 - DNA, 22 bp, Artificial Sequence
  Target B2M Sequence complement
tgacttactgaagaatggagag

SEQ ID NO: 19440 - DNA, 22 bp, Artificial Sequence
  Target B2M Sequence complement
gacttactgaagaatggagaga

SEQ ID NO: 19441 - DNA, 22 bp, Artificial Sequence
  Target B2M Sequence complement
acttactgaagaatggagagag

SEQ ID NO: 19442 - DNA, 22 bp, Artificial Sequence
  Target B2M Sequence complement
cttactgaagaatggagagaga

SEQ ID NO: 19443 - DNA, 22 bp, Artificial Sequence
  Target B2M Sequence complement
ttactgaagaatggagagagaa

SEQ ID NO: 19444 - DNA, 22 bp, Artificial Sequence
  Target B2M Sequence complement
tactgaagaatggagagagaat

SEQ ID NO: 19445 - DNA, 22 bp, Artificial Sequence
  Target B2M Sequence complement
actgaagaatggagagagaatt

SEQ ID NO: 19446 - DNA, 22 bp, Artificial Sequence
  Target B2M Sequence complement
ctgaagaatggagagagaattg

SEQ ID NO: 19447 - DNA, 22 bp, Artificial Sequence
  Target B2M Sequence complement
tgaagaatggagagagaattga

SEQ ID NO: 19448 - DNA, 22 bp, Artificial Sequence
  Target B2M Sequence complement
gaagaatggagagagaattgaa

SEQ ID NO: 19449 - DNA, 22 bp, Artificial Sequence
  Target B2M Sequence complement
aagaatggagagagaattgaaa

SEQ ID NO: 19450 - DNA, 22 bp, Artificial Sequence
  Target B2M Sequence complement
aaagtggagcattcagacttgt

SEQ ID NO: 19451 - DNA, 22 bp, Artificial Sequence
  Target B2M Sequence complement
aagtggagcattcagacttgtc

SEQ ID NO: 19452 - DNA, 22 bp, Artificial Sequence
  Target B2M Sequence complement
agtggagcattcagacttgtct

SEQ ID NO: 19453 - DNA, 22 bp, Artificial Sequence
  Target B2M Sequence complement
gtggagcattcagacttgtctt

SEQ ID NO: 19454 - DNA, 22 bp, Artificial Sequence
  Target B2M Sequence complement
tggagcattcagacttgtcttt

SEQ ID NO: 19455 - DNA, 22 bp, Artificial Sequence
  Target B2M Sequence complement
ggagcattcagacttgtctttc

SEQ ID NO: 19456 - DNA, 22 bp, Artificial Sequence
  Target B2M Sequence complement
gagcattcagacttgtctttca

SEQ ID NO: 19457 - DNA, 22 bp, Artificial Sequence
  Target B2M Sequence complement
agcattcagacttgtctttcag

SEQ ID NO: 19458 - DNA, 22 bp, Artificial Sequence
  Target B2M Sequence complement
gcattcagacttgtctttcagc

SEQ ID NO: 19459 - DNA, 22 bp, Artificial Sequence
  Target B2M Sequence complement
cattcagacttgtctttcagca

SEQ ID NO: 19460 - DNA, 22 bp, Artificial Sequence
  Target B2M Sequence complement
attcagacttgtctttcagcaa

SEQ ID NO: 19461 - DNA, 22 bp, Artificial Sequence
  Target B2M Sequence complement
ttcagacttgtctttcagcaag

SEQ ID NO: 19462 - DNA, 22 bp, Artificial Sequence
  Target B2M Sequence complement
tcagacttgtctttcagcaagg

SEQ ID NO: 19463 - DNA, 22 bp, Artificial Sequence
  Target B2M Sequence complement
cagacttgtctttcagcaagga

SEQ ID NO: 19464 - DNA, 22 bp, Artificial Sequence
  Target B2M Sequence complement
agacttgtctttcagcaaggac

SEQ ID NO: 19465 - DNA, 22 bp, Artificial Sequence
  Target B2M Sequence complement
gacttgtctttcagcaaggact

SEQ ID NO: 19466 - DNA, 22 bp, Artificial Sequence
  Target B2M Sequence complement
acttgtctttcagcaaggactg

SEQ ID NO: 19467 - DNA, 22 bp, Artificial Sequence
  Target B2M Sequence complement
cttgtctttcagcaaggactgg

SEQ ID NO: 19468 - DNA, 22 bp, Artificial Sequence
  Target B2M Sequence complement
ttgtctttcagcaaggactggt

SEQ ID NO: 19469 - DNA, 22 bp, Artificial Sequence
  Target B2M Sequence complement
tgtctttcagcaaggactggtc

SEQ ID NO: 19470 - DNA, 22 bp, Artificial Sequence
  Target B2M Sequence complement
gtctttcagcaaggactggtct

SEQ ID NO: 19471 - DNA, 22 bp, Artificial Sequence
  Target B2M Sequence complement
tctttcagcaaggactggtctt

SEQ ID NO: 19472 - DNA, 22 bp, Artificial Sequence
  Target B2M Sequence complement
ctttcagcaaggactggtcttt

SEQ ID NO: 19473 - DNA, 22 bp, Artificial Sequence
  Target B2M Sequence complement
tttcagcaaggactggtctttc

SEQ ID NO: 19474 - DNA, 22 bp, Artificial Sequence
  Target B2M Sequence complement
ttcagcaaggactggtctttct

SEQ ID NO: 19475 - DNA, 22 bp, Artificial Sequence
  Target B2M Sequence complement
tcagcaaggactggtctttcta

SEQ ID NO: 19476 - DNA, 22 bp, Artificial Sequence
  Target B2M Sequence complement
cagcaaggactggtctttctat

SEQ ID NO: 19477 - DNA, 22 bp, Artificial Sequence
  Target B2M Sequence complement
agcaaggactggtctttctatc

SEQ ID NO: 19478 - DNA, 22 bp, Artificial Sequence
  Target B2M Sequence complement
gcaaggactggtctttctatct

SEQ ID NO: 19479 - DNA, 22 bp, Artificial Sequence
  Target B2M Sequence complement
caaggactggtctttctatctc

SEQ ID NO: 19480 - DNA, 22 bp, Artificial Sequence
  Target B2M Sequence complement
aaggactggtctttctatctct

SEQ ID NO: 19481 - DNA, 22 bp, Artificial Sequence
  Target B2M Sequence complement
aggactggtctttctatctctt

SEQ ID NO: 19482 - DNA, 22 bp, Artificial Sequence
  Target B2M Sequence complement
ggactggtctttctatctcttg

SEQ ID NO: 19483 - DNA, 22 bp, Artificial Sequence
  Target B2M Sequence complement
gactggtctttctatctcttgt

SEQ ID NO: 19484 - DNA, 22 bp, Artificial Sequence
  Target B2M Sequence complement
actggtctttctatctcttgta

SEQ ID NO: 19485 - DNA, 22 bp, Artificial Sequence
  Target B2M Sequence complement
ctggtctttctatctcttgtac

SEQ ID NO: 19486 - DNA, 22 bp, Artificial Sequence
  Target B2M Sequence complement
tggtctttctatctcttgtact

SEQ ID NO: 19487 - DNA, 22 bp, Artificial Sequence
  Target B2M Sequence complement
ggtctttctatctcttgtacta

SEQ ID NO: 19488 - DNA, 22 bp, Artificial Sequence
  Target B2M Sequence complement
gtctttctatctcttgtactac

SEQ ID NO: 19489 - DNA, 22 bp, Artificial Sequence
  Target B2M Sequence complement
tctttctatctcttgtactaca

SEQ ID NO: 19490 - DNA, 22 bp, Artificial Sequence
  Target B2M Sequence complement
ctttctatctcttgtactacac

SEQ ID NO: 19491 - DNA, 22 bp, Artificial Sequence
  Target B2M Sequence complement
tttctatctcttgtactacact

SEQ ID NO: 19492 - DNA, 22 bp, Artificial Sequence
  Target B2M Sequence complement
ttctatctcttgtactacactg

SEQ ID NO: 19493 - DNA, 22 bp, Artificial Sequence
  Target B2M Sequence complement
tctatctcttgtactacactga

SEQ ID NO: 19494 - DNA, 22 bp, Artificial Sequence
  Target B2M Sequence complement
ctatctcttgtactacactgaa

SEQ ID NO: 19495 - DNA, 22 bp, Artificial Sequence
  Target B2M Sequence complement
tatctcttgtactacactgaat

SEQ ID NO: 19496 - DNA, 22 bp, Artificial Sequence
  Target B2M Sequence complement
atctcttgtactacactgaatt

SEQ ID NO: 19497 - DNA, 22 bp, Artificial Sequence
  Target B2M Sequence complement
tctcttgtactacactgaattc

SEQ ID NO: 19498 - DNA, 22 bp, Artificial Sequence
  Target B2M Sequence complement
ctcttgtactacactgaattca

SEQ ID NO: 19499 - DNA, 22 bp, Artificial Sequence
  Target B2M Sequence complement
tcttgtactacactgaattcac

SEQ ID NO: 19500 - DNA, 22 bp, Artificial Sequence
  Target B2M Sequence complement
cttgtactacactgaattcacc

SEQ ID NO: 19501 - DNA, 22 bp, Artificial Sequence
  Target B2M Sequence complement
ttgtactacactgaattcaccc

SEQ ID NO: 19502 - DNA, 22 bp, Artificial Sequence
  Target B2M Sequence complement
aaagatgagtatgcctgccgtg

SEQ ID NO: 19503 - DNA, 22 bp, Artificial Sequence
  Target B2M Sequence complement
aagatgagtatgcctgccgtgt

SEQ ID NO: 19504 - DNA, 22 bp, Artificial Sequence
  Target B2M Sequence complement
agatgagtatgcctgccgtgtg

SEQ ID NO: 19505 - DNA, 22 bp, Artificial Sequence
  Target B2M Sequence complement
gatgagtatgcctgccgtgtga

SEQ ID NO: 19506 - DNA, 22 bp, Artificial Sequence
  Target B2M Sequence complement
atgagtatgcctgccgtgtgaa

SEQ ID NO: 19507 - DNA, 22 bp, Artificial Sequence
  Target B2M Sequence complement
tgagtatgcctgccgtgtgaac

SEQ ID NO: 19508 - DNA, 22 bp, Artificial Sequence
  Target B2M Sequence complement
gagtatgcctgccgtgtgaacc

SEQ ID NO: 19509 - DNA, 22 bp, Artificial Sequence
  Target B2M Sequence complement
agtatgcctgccgtgtgaacca

SEQ ID NO: 19510 - DNA, 22 bp, Artificial Sequence
  Target B2M Sequence complement
gtatgcctgccgtgtgaaccat

SEQ ID NO: 19511 - DNA, 22 bp, Artificial Sequence
  Target B2M Sequence complement
tatgcctgccgtgtgaaccatg

SEQ ID NO: 19512 - DNA, 22 bp, Artificial Sequence
  Target B2M Sequence complement
atgcctgccgtgtgaaccatgt

SEQ ID NO: 19513 - DNA, 22 bp, Artificial Sequence
  Target B2M Sequence complement
tgcctgccgtgtgaaccatgtg

SEQ ID NO: 19514 - DNA, 22 bp, Artificial Sequence
  Target B2M Sequence complement
gcctgccgtgtgaaccatgtga

SEQ ID NO: 19515 - DNA, 22 bp, Artificial Sequence
  Target B2M Sequence complement
cctgccgtgtgaaccatgtgac

SEQ ID NO: 19516 - DNA, 22 bp, Artificial Sequence
  Target B2M Sequence complement
ctgccgtgtgaaccatgtgact

SEQ ID NO: 19517 - DNA, 22 bp, Artificial Sequence
  Target B2M Sequence complement
tgccgtgtgaaccatgtgactt

SEQ ID NO: 19518 - DNA, 22 bp, Artificial Sequence
  Target B2M Sequence complement
gccgtgtgaaccatgtgacttt

SEQ ID NO: 19519 - DNA, 22 bp, Artificial Sequence
  Target B2M Sequence complement
ccgtgtgaaccatgtgactttg

SEQ ID NO: 19520 - DNA, 22 bp, Artificial Sequence
  Target B2M Sequence complement
cgtgtgaaccatgtgactttgt

SEQ ID NO: 19521 - DNA, 22 bp, Artificial Sequence
  Target B2M Sequence complement
gtgtgaaccatgtgactttgtc

SEQ ID NO: 19522 - DNA, 22 bp, Artificial Sequence
  Target B2M Sequence complement
tgtgaaccatgtgactttgtca

SEQ ID NO: 19523 - DNA, 22 bp, Artificial Sequence
  Target B2M Sequence complement
gtgaaccatgtgactttgtcac

SEQ ID NO: 19524 - DNA, 22 bp, Artificial Sequence
  Target B2M Sequence complement
tgaaccatgtgactttgtcaca

SEQ ID NO: 19525 - DNA, 22 bp, Artificial Sequence
  Target B2M Sequence complement
gaaccatgtgactttgtcacag

SEQ ID NO: 19526 - DNA, 22 bp, Artificial Sequence
  Target B2M Sequence complement
aaccatgtgactttgtcacagc

SEQ ID NO: 19527 - DNA, 22 bp, Artificial Sequence
  Target B2M Sequence complement
accatgtgactttgtcacagcc

SEQ ID NO: 19528 - DNA, 22 bp, Artificial Sequence
  Target B2M Sequence complement
ccatgtgactttgtcacagccc

SEQ ID NO: 19529 - DNA, 22 bp, Artificial Sequence
  Target B2M Sequence complement
catgtgactttgtcacagccca

SEQ ID NO: 19530 - DNA, 22 bp, Artificial Sequence
  Target B2M Sequence complement
atgtgactttgtcacagcccaa

SEQ ID NO: 19531 - DNA, 22 bp, Artificial Sequence
  Target B2M Sequence complement
tgtgactttgtcacagcccaag

SEQ ID NO: 19532 - DNA, 22 bp, Artificial Sequence
  Target B2M Sequence complement
gtgactttgtcacagcccaaga

SEQ ID NO: 19533 - DNA, 22 bp, Artificial Sequence
  Target B2M Sequence complement
tgactttgtcacagcccaagat

SEQ ID NO: 19534 - DNA, 22 bp, Artificial Sequence
  Target B2M Sequence complement
gactttgtcacagcccaagata

SEQ ID NO: 19535 - DNA, 22 bp, Artificial Sequence
  Target B2M Sequence complement
actttgtcacagcccaagatag

SEQ ID NO: 19536 - DNA, 22 bp, Artificial Sequence
  Target B2M Sequence complement
ctttgtcacagcccaagatagt

SEQ ID NO: 19537 - DNA, 22 bp, Artificial Sequence
  Target B2M Sequence complement
tttgtcacagcccaagatagtt

SEQ ID NO: 19538 - DNA, 22 bp, Artificial Sequence
  Target B2M Sequence complement
ttgtcacagcccaagatagtta

SEQ ID NO: 19539 - DNA, 22 bp, Artificial Sequence
  Target B2M Sequence complement
tgtcacagcccaagatagttaa

SEQ ID NO: 19540 - DNA, 22 bp, Artificial Sequence
  Target B2M Sequence complement
gtcacagcccaagatagttaag

SEQ ID NO: 19541 - DNA, 22 bp, Artificial Sequence
  Target B2M Sequence complement
tcacagcccaagatagttaagt

SEQ ID NO: 19542 - DNA, 22 bp, Artificial Sequence
  Target B2M Sequence complement
cacagcccaagatagttaagtg

SEQ ID NO: 19543 - DNA, 22 bp, Artificial Sequence
  Target B2M Sequence complement
acagcccaagatagttaagtgg

SEQ ID NO: 19544 - DNA, 22 bp, Artificial Sequence
  Target B2M Sequence complement
cagcccaagatagttaagtggg

SEQ ID NO: 19545 - DNA, 22 bp, Artificial Sequence
  Target B2M Sequence complement
agcccaagatagttaagtggga

SEQ ID NO: 19546 - DNA, 22 bp, Artificial Sequence
  Target B2M Sequence complement
gcccaagatagttaagtgggat

SEQ ID NO: 19547 - DNA, 22 bp, Artificial Sequence
  Target B2M Sequence complement
cccaagatagttaagtgggatc

SEQ ID NO: 19548 - DNA, 22 bp, Artificial Sequence
  Target B2M Sequence complement
ccaagatagttaagtgggatcg

SEQ ID NO: 19549 - DNA, 22 bp, Artificial Sequence
  Target B2M Sequence complement
caagatagttaagtgggatcga

SEQ ID NO: 19550 - DNA, 22 bp, Artificial Sequence
  Target B2M Sequence complement
aagatagttaagtgggatcgag

SEQ ID NO: 19551 - DNA, 22 bp, Artificial Sequence
  Target B2M Sequence complement
agatagttaagtgggatcgaga

SEQ ID NO: 19552 - DNA, 22 bp, Artificial Sequence
  Target B2M Sequence complement
gatagttaagtgggatcgagac

SEQ ID NO: 19553 - DNA, 22 bp, Artificial Sequence
  Target B2M Sequence complement
atagttaagtgggatcgagaca

SEQ ID NO: 19554 - DNA, 22 bp, Artificial Sequence
  Target B2M Sequence complement
tagttaagtgggatcgagacat

SEQ ID NO: 19555 - DNA, 22 bp, Artificial Sequence
  Target B2M Sequence complement
agttaagtgggatcgagacatg

SEQ ID NO: 19556 - DNA, 22 bp, Artificial Sequence
  Target B2M Sequence complement
gttaagtgggatcgagacatgt

SEQ ID NO: 19557 - DNA, 22 bp, Artificial Sequence
  Target B2M Sequence complement
ttaagtgggatcgagacatgta

SEQ ID NO: 19558 - DNA, 22 bp, Artificial Sequence
  Target B2M Sequence complement
taagtgggatcgagacatgtaa

SEQ ID NO: 19559 - DNA, 22 bp, Artificial Sequence
  Target B2M Sequence complement
aagtgggatcgagacatgtaag

SEQ ID NO: 19560 - DNA, 22 bp, Artificial Sequence
  Target B2M Sequence complement
agtgggatcgagacatgtaagc

SEQ ID NO: 19561 - DNA, 22 bp, Artificial Sequence
  Target B2M Sequence complement
gtgggatcgagacatgtaagca

SEQ ID NO: 19562 - DNA, 22 bp, Artificial Sequence
  Target B2M Sequence complement
tgggatcgagacatgtaagcag

SEQ ID NO: 19563 - DNA, 22 bp, Artificial Sequence
  Target B2M Sequence complement
gggatcgagacatgtaagcagc

SEQ ID NO: 19564 - DNA, 22 bp, Artificial Sequence
  Target B2M Sequence complement
ggatcgagacatgtaagcagca

SEQ ID NO: 19565 - DNA, 22 bp, Artificial Sequence
  Target B2M Sequence complement
gatcgagacatgtaagcagcat

SEQ ID NO: 19566 - DNA, 22 bp, Artificial Sequence
  Target B2M Sequence complement
atcgagacatgtaagcagcatc

SEQ ID NO: 19567 - DNA, 22 bp, Artificial Sequence
  Target B2M Sequence complement
tcgagacatgtaagcagcatca

SEQ ID NO: 19568 - DNA, 22 bp, Artificial Sequence
  Target B2M Sequence complement
cgagacatgtaagcagcatcat

SEQ ID NO: 19569 - DNA, 22 bp, Artificial Sequence
  Target B2M Sequence complement
gagacatgtaagcagcatcatg

SEQ ID NO: 19570 - DNA, 22 bp, Artificial Sequence
  Target B2M Sequence complement
agacatgtaagcagcatcatgg

SEQ ID NO: 19571 - DNA, 22 bp, Artificial Sequence
  Target B2M Sequence complement
gacatgtaagcagcatcatgga

SEQ ID NO: 19572 - DNA, 22 bp, Artificial Sequence
  Target B2M Sequence complement
acatgtaagcagcatcatggag

SEQ ID NO: 19573 - DNA, 22 bp, Artificial Sequence
  Target B2M Sequence complement
catgtaagcagcatcatggagg

SEQ ID NO: 19574 - DNA, 22 bp, Artificial Sequence
  Target B2M Sequence complement
atgtaagcagcatcatggaggt

SEQ ID NO: 19575 - DNA, 22 bp, Artificial Sequence
  Target B2M Sequence complement
tgtaagcagcatcatggaggtt

SEQ ID NO: 19576 - DNA, 22 bp, Artificial Sequence
  Target B2M Sequence complement
gtaagcagcatcatggaggttt

SEQ ID NO: 19577 - DNA, 22 bp, Artificial Sequence
  Target B2M Sequence complement
taagcagcatcatggaggtttg

SEQ ID NO: 19578 - DNA, 22 bp, Artificial Sequence
  Target B2M Sequence complement
aagcagcatcatggaggtttga

SEQ ID NO: 19579 - DNA, 22 bp, Artificial Sequence
  Target B2M Sequence complement
agcagcatcatggaggtttgaa

SEQ ID NO: 19580 - DNA, 22 bp, Artificial Sequence
  Target B2M Sequence complement
gcagcatcatggaggtttgaag

SEQ ID NO: 19581 - DNA, 22 bp, Artificial Sequence
  Target B2M Sequence complement
cagcatcatggaggtttgaaga

SEQ ID NO: 19582 - DNA, 22 bp, Artificial Sequence
  Target B2M Sequence complement
agcatcatggaggtttgaagat

SEQ ID NO: 19583 - DNA, 22 bp, Artificial Sequence
  Target B2M Sequence complement
gcatcatggaggtttgaagatg

SEQ ID NO: 19584 - DNA, 22 bp, Artificial Sequence
  Target B2M Sequence complement
catcatggaggtttgaagatgc

SEQ ID NO: 19585 - DNA, 22 bp, Artificial Sequence
  Target B2M Sequence complement
atcatggaggtttgaagatgcc

SEQ ID NO: 19586 - DNA, 22 bp, Artificial Sequence
  Target B2M Sequence complement
tcatggaggtttgaagatgccg

SEQ ID NO: 19587 - DNA, 22 bp, Artificial Sequence
  Target B2M Sequence complement
catggaggtttgaagatgccgc

SEQ ID NO: 19588 - DNA, 22 bp, Artificial Sequence
  Target B2M Sequence complement
atggaggtttgaagatgccgca

SEQ ID NO: 19589 - DNA, 22 bp, Artificial Sequence
  Target B2M Sequence complement
tggaggtttgaagatgccgcat

SEQ ID NO: 19590 - DNA, 22 bp, Artificial Sequence
  Target B2M Sequence complement
ggaggtttgaagatgccgcatt

SEQ ID NO: 19591 - DNA, 22 bp, Artificial Sequence
  Target B2M Sequence complement
gaggtttgaagatgccgcattt

SEQ ID NO: 19592 - DNA, 22 bp, Artificial Sequence
  Target B2M Sequence complement
aggtttgaagatgccgcatttg

SEQ ID NO: 19593 - DNA, 22 bp, Artificial Sequence
  Target B2M Sequence complement
ggtttgaagatgccgcatttgg

SEQ ID NO: 19594 - DNA, 22 bp, Artificial Sequence
  Target B2M Sequence complement
gtttgaagatgccgcatttgga

SEQ ID NO: 19595 - DNA, 22 bp, Artificial Sequence
  Target B2M Sequence complement
tttgaagatgccgcatttggat

SEQ ID NO: 19596 - DNA, 22 bp, Artificial Sequence
  Target B2M Sequence complement
ttgaagatgccgcatttggatt

SEQ ID NO: 19597 - DNA, 22 bp, Artificial Sequence
  Target B2M Sequence complement
tgaagatgccgcatttggattg

SEQ ID NO: 19598 - DNA, 22 bp, Artificial Sequence
  Target B2M Sequence complement
gaagatgccgcatttggattgg

SEQ ID NO: 19599 - DNA, 22 bp, Artificial Sequence
  Target B2M Sequence complement
aagatgccgcatttggattgga

SEQ ID NO: 19600 - DNA, 22 bp, Artificial Sequence
  Target B2M Sequence complement
agatgccgcatttggattggat

SEQ ID NO: 19601 - DNA, 22 bp, Artificial Sequence
  Target B2M Sequence complement
gatgccgcatttggattggatg

SEQ ID NO: 19602 - DNA, 22 bp, Artificial Sequence
  Target B2M Sequence complement
atgccgcatttggattggatga

SEQ ID NO: 19603 - DNA, 22 bp, Artificial Sequence
  Target B2M Sequence complement
tgccgcatttggattggatgaa

SEQ ID NO: 19604 - DNA, 22 bp, Artificial Sequence
  Target B2M Sequence complement
gccgcatttggattggatgaat

SEQ ID NO: 19605 - DNA, 22 bp, Artificial Sequence
  Target B2M Sequence complement
ccgcatttggattggatgaatt

SEQ ID NO: 19606 - DNA, 22 bp, Artificial Sequence
  Target B2M Sequence complement
cgcatttggattggatgaattc

SEQ ID NO: 19607 - DNA, 22 bp, Artificial Sequence
  Target B2M Sequence complement
gcatttggattggatgaattcc

SEQ ID NO: 19608 - DNA, 22 bp, Artificial Sequence
  Target B2M Sequence complement
catttggattggatgaattcca

SEQ ID NO: 19609 - DNA, 22 bp, Artificial Sequence
  Target B2M Sequence complement
atttggattggatgaattccaa

SEQ ID NO: 19610 - DNA, 22 bp, Artificial Sequence
  Target B2M Sequence complement
tttggattggatgaattccaaa

SEQ ID NO: 19611 - DNA, 22 bp, Artificial Sequence
  Target B2M Sequence complement
ttggattggatgaattccaaat

SEQ ID NO: 19612 - DNA, 22 bp, Artificial Sequence
  Target B2M Sequence complement
tggattggatgaattccaaatt

SEQ ID NO: 19613 - DNA, 22 bp, Artificial Sequence
  Target B2M Sequence complement
ggattggatgaattccaaattc

SEQ ID NO: 19614 - DNA, 22 bp, Artificial Sequence
  Target B2M Sequence complement
gattggatgaattccaaattct

SEQ ID NO: 19615 - DNA, 22 bp, Artificial Sequence
  Target B2M Sequence complement
attggatgaattccaaattctg

SEQ ID NO: 19616 - DNA, 22 bp, Artificial Sequence
  Target B2M Sequence complement
ttggatgaattccaaattctgc

SEQ ID NO: 19617 - DNA, 22 bp, Artificial Sequence
  Target B2M Sequence complement
tggatgaattccaaattctgct

SEQ ID NO: 19618 - DNA, 22 bp, Artificial Sequence
  Target B2M Sequence complement
ggatgaattccaaattctgctt

SEQ ID NO: 19619 - DNA, 22 bp, Artificial Sequence
  Target B2M Sequence complement
gatgaattccaaattctgcttg

SEQ ID NO: 19620 - DNA, 22 bp, Artificial Sequence
  Target B2M Sequence complement
atgaattccaaattctgcttgc

SEQ ID NO: 19621 - DNA, 22 bp, Artificial Sequence
  Target B2M Sequence complement
tgaattccaaattctgcttgct

SEQ ID NO: 19622 - DNA, 22 bp, Artificial Sequence
  Target B2M Sequence complement
gaattccaaattctgcttgctt

SEQ ID NO: 19623 - DNA, 22 bp, Artificial Sequence
  Target B2M Sequence complement
aattccaaattctgcttgcttg

SEQ ID NO: 19624 - DNA, 22 bp, Artificial Sequence
  Target B2M Sequence complement
attccaaattctgcttgcttgc

SEQ ID NO: 19625 - DNA, 22 bp, Artificial Sequence
  Target B2M Sequence complement
ttccaaattctgcttgcttgct

SEQ ID NO: 19626 - DNA, 22 bp, Artificial Sequence
  Target B2M Sequence complement
tccaaattctgcttgcttgctt

SEQ ID NO: 19627 - DNA, 22 bp, Artificial Sequence
  Target B2M Sequence complement
ccaaattctgcttgcttgcttt

SEQ ID NO: 19628 - DNA, 22 bp, Artificial Sequence
  Target B2M Sequence complement
attgatatgcttatacacttac

SEQ ID NO: 19629 - DNA, 22 bp, Artificial Sequence
  Target B2M Sequence complement
ttgatatgcttatacacttaca

SEQ ID NO: 19630 - DNA, 22 bp, Artificial Sequence
  Target B2M Sequence complement
tgatatgcttatacacttacac

SEQ ID NO: 19631 - DNA, 22 bp, Artificial Sequence
  Target B2M Sequence complement
gatatgcttatacacttacact

SEQ ID NO: 19632 - DNA, 22 bp, Artificial Sequence
  Target B2M Sequence complement
atatgcttatacacttacactt

SEQ ID NO: 19633 - DNA, 22 bp, Artificial Sequence
  Target B2M Sequence complement
tatgcttatacacttacacttt

SEQ ID NO: 19634 - DNA, 22 bp, Artificial Sequence
  Target B2M Sequence complement
atgcttatacacttacacttta

SEQ ID NO: 19635 - DNA, 22 bp, Artificial Sequence
  Target B2M Sequence complement
tgcttatacacttacactttat

SEQ ID NO: 19636 - DNA, 22 bp, Artificial Sequence
  Target B2M Sequence complement
gcttatacacttacactttatg

SEQ ID NO: 19637 - DNA, 22 bp, Artificial Sequence
  Target B2M Sequence complement
cttatacacttacactttatgc

SEQ ID NO: 19638 - DNA, 22 bp, Artificial Sequence
  Target B2M Sequence complement
ttatacacttacactttatgca

SEQ ID NO: 19639 - DNA, 22 bp, Artificial Sequence
  Target B2M Sequence complement
tatacacttacactttatgcac

SEQ ID NO: 19640 - DNA, 22 bp, Artificial Sequence
  Target B2M Sequence complement
atacacttacactttatgcaca

SEQ ID NO: 19641 - DNA, 22 bp, Artificial Sequence
  Target B2M Sequence complement
tacacttacactttatgcacaa

SEQ ID NO: 19642 - DNA, 22 bp, Artificial Sequence
  Target B2M Sequence complement
acacttacactttatgcacaaa

SEQ ID NO: 19643 - DNA, 22 bp, Artificial Sequence
  Target B2M Sequence complement
gtagggttataataatgttaac

SEQ ID NO: 19644 - DNA, 22 bp, Artificial Sequence
  Target B2M Sequence complement
gggttataataatgttaacatg

SEQ ID NO: 19645 - DNA, 22 bp, Artificial Sequence
  Target B2M Sequence complement
ggttataataatgttaacatgg

SEQ ID NO: 19646 - DNA, 22 bp, Artificial Sequence
  Target B2M Sequence complement
taataatgttaacatggacatg

SEQ ID NO: 19647 - DNA, 22 bp, Artificial Sequence
  Target B2M Sequence complement
aataatgttaacatggacatga

SEQ ID NO: 19648 - DNA, 22 bp, Artificial Sequence
  Target B2M Sequence complement
ataatgttaacatggacatgat

SEQ ID NO: 19649 - DNA, 22 bp, Artificial Sequence
  Target B2M Sequence complement
taatgttaacatggacatgatc

SEQ ID NO: 19650 - DNA, 22 bp, Artificial Sequence
  Target B2M Sequence complement
aatgttaacatggacatgatct

SEQ ID NO: 19651 - DNA, 22 bp, Artificial Sequence
  Target B2M Sequence complement
atgttaacatggacatgatctt

SEQ ID NO: 19652 - DNA, 22 bp, Artificial Sequence
  Target B2M Sequence complement
tgttaacatggacatgatcttc

SEQ ID NO: 19653 - DNA, 22 bp, Artificial Sequence
  Target B2M Sequence complement
gttaacatggacatgatcttct

SEQ ID NO: 19654 - DNA, 22 bp, Artificial Sequence
  Target B2M Sequence complement
ttaacatggacatgatcttctt

SEQ ID NO: 19655 - DNA, 22 bp, Artificial Sequence
  Target B2M Sequence complement
taacatggacatgatcttcttt

SEQ ID NO: 19656 - DNA, 22 bp, Artificial Sequence
  Target B2M Sequence complement
aacatggacatgatcttcttta

SEQ ID NO: 19657 - DNA, 22 bp, Artificial Sequence
  Target B2M Sequence complement
acatggacatgatcttctttat

SEQ ID NO: 19658 - DNA, 22 bp, Artificial Sequence
  Target B2M Sequence complement
catggacatgatcttctttata

SEQ ID NO: 19659 - DNA, 22 bp, Artificial Sequence
  Target B2M Sequence complement
atggacatgatcttctttataa

SEQ ID NO: 19660 - DNA, 22 bp, Artificial Sequence
  Target B2M Sequence complement
tggacatgatcttctttataat

SEQ ID NO: 19661 - DNA, 22 bp, Artificial Sequence
  Target B2M Sequence complement
ggacatgatcttctttataatt

SEQ ID NO: 19662 - DNA, 22 bp, Artificial Sequence
  Target B2M Sequence complement
gacatgatcttctttataattc

SEQ ID NO: 19663 - DNA, 22 bp, Artificial Sequence
  Target B2M Sequence complement
ctttataattctactttgagtg

SEQ ID NO: 19664 - DNA, 22 bp, Artificial Sequence
  Target B2M Sequence complement
tttataattctactttgagtgc

SEQ ID NO: 19665 - DNA, 22 bp, Artificial Sequence
  Target B2M Sequence complement
ttataattctactttgagtgct

SEQ ID NO: 19666 - DNA, 22 bp, Artificial Sequence
  Target B2M Sequence complement
tataattctactttgagtgctg

SEQ ID NO: 19667 - DNA, 22 bp, Artificial Sequence
  Target B2M Sequence complement
ataattctactttgagtgctgt

SEQ ID NO: 19668 - DNA, 22 bp, Artificial Sequence
  Target B2M Sequence complement
taattctactttgagtgctgtc

SEQ ID NO: 19669 - DNA, 22 bp, Artificial Sequence
  Target B2M Sequence complement
aattctactttgagtgctgtct

SEQ ID NO: 19670 - DNA, 22 bp, Artificial Sequence
  Target B2M Sequence complement
attctactttgagtgctgtctc

SEQ ID NO: 19671 - DNA, 22 bp, Artificial Sequence
  Target B2M Sequence complement
ttctactttgagtgctgtctcc

SEQ ID NO: 19672 - DNA, 22 bp, Artificial Sequence
  Target B2M Sequence complement
tctactttgagtgctgtctcca

SEQ ID NO: 19673 - DNA, 22 bp, Artificial Sequence
  Target B2M Sequence complement
ctactttgagtgctgtctccat

SEQ ID NO: 19674 - DNA, 22 bp, Artificial Sequence
  Target B2M Sequence complement
tactttgagtgctgtctccatg

SEQ ID NO: 19675 - DNA, 22 bp, Artificial Sequence
  Target B2M Sequence complement
actttgagtgctgtctccatgt

SEQ ID NO: 19676 - DNA, 22 bp, Artificial Sequence
  Target B2M Sequence complement
ctttgagtgctgtctccatgtt

SEQ ID NO: 19677 - DNA, 22 bp, Artificial Sequence
  Target B2M Sequence complement
tttgagtgctgtctccatgttt

SEQ ID NO: 19678 - DNA, 22 bp, Artificial Sequence
  Target B2M Sequence complement
ttgagtgctgtctccatgtttg

SEQ ID NO: 19679 - DNA, 22 bp, Artificial Sequence
  Target B2M Sequence complement
tgagtgctgtctccatgtttga

SEQ ID NO: 19680 - DNA, 22 bp, Artificial Sequence
  Target B2M Sequence complement
gagtgctgtctccatgtttgat

SEQ ID NO: 19681 - DNA, 22 bp, Artificial Sequence
  Target B2M Sequence complement
agtgctgtctccatgtttgatg

SEQ ID NO: 19682 - DNA, 22 bp, Artificial Sequence
  Target B2M Sequence complement
gtgctgtctccatgtttgatgt

SEQ ID NO: 19683 - DNA, 22 bp, Artificial Sequence
  Target B2M Sequence complement
tgctgtctccatgtttgatgta

SEQ ID NO: 19684 - DNA, 22 bp, Artificial Sequence
  Target B2M Sequence complement
gctgtctccatgtttgatgtat

SEQ ID NO: 19685 - DNA, 22 bp, Artificial Sequence
  Target B2M Sequence complement
ctgtctccatgtttgatgtatc

SEQ ID NO: 19686 - DNA, 22 bp, Artificial Sequence
  Target B2M Sequence complement
tgtctccatgtttgatgtatct

SEQ ID NO: 19687 - DNA, 22 bp, Artificial Sequence
  Target B2M Sequence complement
gtctccatgtttgatgtatctg

SEQ ID NO: 19688 - DNA, 22 bp, Artificial Sequence
  Target B2M Sequence complement
tctccatgtttgatgtatctga

SEQ ID NO: 19689 - DNA, 22 bp, Artificial Sequence
  Target B2M Sequence complement
ctccatgtttgatgtatctgag

SEQ ID NO: 19690 - DNA, 22 bp, Artificial Sequence
  Target B2M Sequence complement
tccatgtttgatgtatctgagc

SEQ ID NO: 19691 - DNA, 22 bp, Artificial Sequence
  Target B2M Sequence complement
ccatgtttgatgtatctgagca

SEQ ID NO: 19692 - DNA, 22 bp, Artificial Sequence
  Target B2M Sequence complement
catgtttgatgtatctgagcag

SEQ ID NO: 19693 - DNA, 22 bp, Artificial Sequence
  Target B2M Sequence complement
atgtttgatgtatctgagcagg

SEQ ID NO: 19694 - DNA, 22 bp, Artificial Sequence
  Target B2M Sequence complement
tgtttgatgtatctgagcaggt

SEQ ID NO: 19695 - DNA, 22 bp, Artificial Sequence
  Target B2M Sequence complement
gtttgatgtatctgagcaggtt

SEQ ID NO: 19696 - DNA, 22 bp, Artificial Sequence
  Target B2M Sequence complement
tttgatgtatctgagcaggttg

SEQ ID NO: 19697 - DNA, 22 bp, Artificial Sequence
  Target B2M Sequence complement
ttgatgtatctgagcaggttgc

SEQ ID NO: 19698 - DNA, 22 bp, Artificial Sequence
  Target B2M Sequence complement
tgatgtatctgagcaggttgct

SEQ ID NO: 19699 - DNA, 22 bp, Artificial Sequence
  Target B2M Sequence complement
gatgtatctgagcaggttgctc

SEQ ID NO: 19700 - DNA, 22 bp, Artificial Sequence
  Target B2M Sequence complement
atgtatctgagcaggttgctcc

SEQ ID NO: 19701 - DNA, 22 bp, Artificial Sequence
  Target B2M Sequence complement
tgtatctgagcaggttgctcca

SEQ ID NO: 19702 - DNA, 22 bp, Artificial Sequence
  Target B2M Sequence complement
gtatctgagcaggttgctccac

SEQ ID NO: 19703 - DNA, 22 bp, Artificial Sequence
  Target B2M Sequence complement
tatctgagcaggttgctccaca

SEQ ID NO: 19704 - DNA, 22 bp, Artificial Sequence
  Target B2M Sequence complement
atctgagcaggttgctccacag

SEQ ID NO: 19705 - DNA, 22 bp, Artificial Sequence
  Target B2M Sequence complement
tctgagcaggttgctccacagg

SEQ ID NO: 19706 - DNA, 22 bp, Artificial Sequence
  Target B2M Sequence complement
ctgagcaggttgctccacaggt

SEQ ID NO: 19707 - DNA, 22 bp, Artificial Sequence
  Target B2M Sequence complement
tgagcaggttgctccacaggta

SEQ ID NO: 19708 - DNA, 22 bp, Artificial Sequence
  Target B2M Sequence complement
gagcaggttgctccacaggtag

SEQ ID NO: 19709 - DNA, 22 bp, Artificial Sequence
  Target B2M Sequence complement
agcaggttgctccacaggtagc

SEQ ID NO: 19710 - DNA, 22 bp, Artificial Sequence
  Target B2M Sequence complement
gcaggttgctccacaggtagct

SEQ ID NO: 19711 - DNA, 22 bp, Artificial Sequence
  Target B2M Sequence complement
caggttgctccacaggtagctc

SEQ ID NO: 19712 - DNA, 22 bp, Artificial Sequence
  Target B2M Sequence complement
aggttgctccacaggtagctct

SEQ ID NO: 19713 - DNA, 22 bp, Artificial Sequence
  Target B2M Sequence complement
ggttgctccacaggtagctcta

SEQ ID NO: 19714 - DNA, 22 bp, Artificial Sequence
  Target B2M Sequence complement
gttgctccacaggtagctctag

SEQ ID NO: 19715 - DNA, 22 bp, Artificial Sequence
  Target B2M Sequence complement
ttgctccacaggtagctctagg

SEQ ID NO: 19716 - DNA, 22 bp, Artificial Sequence
  Target B2M Sequence complement
tgctccacaggtagctctagga

SEQ ID NO: 19717 - DNA, 22 bp, Artificial Sequence
  Target B2M Sequence complement
gctccacaggtagctctaggag

SEQ ID NO: 19718 - DNA, 22 bp, Artificial Sequence
  Target B2M Sequence complement
ctccacaggtagctctaggagg

SEQ ID NO: 19719 - DNA, 22 bp, Artificial Sequence
  Target B2M Sequence complement
tccacaggtagctctaggaggg

SEQ ID NO: 19720 - DNA, 22 bp, Artificial Sequence
  Target B2M Sequence complement
cacaggtagctctaggagggct

SEQ ID NO: 19721 - DNA, 22 bp, Artificial Sequence
  Target B2M Sequence complement
acaggtagctctaggagggctg

SEQ ID NO: 19722 - DNA, 22 bp, Artificial Sequence
  Target B2M Sequence complement
gtagctctaggagggctggcaa

SEQ ID NO: 19723 - DNA, 22 bp, Artificial Sequence
  Target B2M Sequence complement
tagctctaggagggctggcaac

SEQ ID NO: 19724 - DNA, 22 bp, Artificial Sequence
  Target B2M Sequence complement
agctctaggagggctggcaact

SEQ ID NO: 19725 - DNA, 22 bp, Artificial Sequence
  Target B2M Sequence complement
gctctaggagggctggcaactt

SEQ ID NO: 19726 - DNA, 22 bp, Artificial Sequence
  Target B2M Sequence complement
ctctaggagggctggcaactta

SEQ ID NO: 19727 - DNA, 22 bp, Artificial Sequence
  Target B2M Sequence complement
tctaggagggctggcaacttag

SEQ ID NO: 19728 - DNA, 22 bp, Artificial Sequence
  Target B2M Sequence complement
ctaggagggctggcaacttaga

SEQ ID NO: 19729 - DNA, 22 bp, Artificial Sequence
  Target B2M Sequence complement
taggagggctggcaacttagag

SEQ ID NO: 19730 - DNA, 22 bp, Artificial Sequence
  Target B2M Sequence complement
aggagggctggcaacttagagg

SEQ ID NO: 19731 - DNA, 22 bp, Artificial Sequence
  Target B2M Sequence complement
ggagggctggcaacttagaggt

SEQ ID NO: 19732 - DNA, 22 bp, Artificial Sequence
  Target B2M Sequence complement
gagggctggcaacttagaggtg

SEQ ID NO: 19733 - DNA, 22 bp, Artificial Sequence
  Target B2M Sequence complement
agggctggcaacttagaggtgg

SEQ ID NO: 19734 - DNA, 22 bp, Artificial Sequence
  Target B2M Sequence complement
gggagcagagaattctcttatc

SEQ ID NO: 19735 - DNA, 22 bp, Artificial Sequence
  Target B2M Sequence complement
ggagcagagaattctcttatcc

SEQ ID NO: 19736 - DNA, 22 bp, Artificial Sequence
  Target B2M Sequence complement
gagcagagaattctcttatcca

SEQ ID NO: 19737 - DNA, 22 bp, Artificial Sequence
  Target B2M Sequence complement
agcagagaattctcttatccaa

SEQ ID NO: 19738 - DNA, 22 bp, Artificial Sequence
  Target B2M Sequence complement
gcagagaattctcttatccaac

SEQ ID NO: 19739 - DNA, 22 bp, Artificial Sequence
  Target B2M Sequence complement
cagagaattctcttatccaaca

SEQ ID NO: 19740 - DNA, 22 bp, Artificial Sequence
  Target B2M Sequence complement
agagaattctcttatccaacat

SEQ ID NO: 19741 - DNA, 22 bp, Artificial Sequence
  Target B2M Sequence complement
gagaattctcttatccaacatc

SEQ ID NO: 19742 - DNA, 22 bp, Artificial Sequence
  Target B2M Sequence complement
agaattctcttatccaacatca

SEQ ID NO: 19743 - DNA, 22 bp, Artificial Sequence
  Target B2M Sequence complement
gaattctcttatccaacatcaa

SEQ ID NO: 19744 - DNA, 22 bp, Artificial Sequence
  Target B2M Sequence complement
aattctcttatccaacatcaac

SEQ ID NO: 19745 - DNA, 22 bp, Artificial Sequence
  Target B2M Sequence complement
attctcttatccaacatcaaca

SEQ ID NO: 19746 - DNA, 22 bp, Artificial Sequence
  Target B2M Sequence complement
ttctcttatccaacatcaacat

SEQ ID NO: 19747 - DNA, 22 bp, Artificial Sequence
  Target B2M Sequence complement
tctcttatccaacatcaacatc

SEQ ID NO: 19748 - DNA, 22 bp, Artificial Sequence
  Target B2M Sequence complement
ctcttatccaacatcaacatct

SEQ ID NO: 19749 - DNA, 22 bp, Artificial Sequence
  Target B2M Sequence complement
tcttatccaacatcaacatctt

SEQ ID NO: 19750 - DNA, 22 bp, Artificial Sequence
  Target B2M Sequence complement
cttatccaacatcaacatcttg

SEQ ID NO: 19751 - DNA, 22 bp, Artificial Sequence
  Target B2M Sequence complement
ttatccaacatcaacatcttgg

SEQ ID NO: 19752 - DNA, 22 bp, Artificial Sequence
  Target B2M Sequence complement
tatccaacatcaacatcttggt

SEQ ID NO: 19753 - DNA, 22 bp, Artificial Sequence
  Target B2M Sequence complement
atccaacatcaacatcttggtc

SEQ ID NO: 19754 - DNA, 22 bp, Artificial Sequence
  Target B2M Sequence complement
tccaacatcaacatcttggtca

SEQ ID NO: 19755 - DNA, 22 bp, Artificial Sequence
  Target B2M Sequence complement
ccaacatcaacatcttggtcag

SEQ ID NO: 19756 - DNA, 22 bp, Artificial Sequence
  Target B2M Sequence complement
caacatcaacatcttggtcaga

SEQ ID NO: 19757 - DNA, 22 bp, Artificial Sequence
  Target B2M Sequence complement
aacatcaacatcttggtcagat

SEQ ID NO: 19758 - DNA, 22 bp, Artificial Sequence
  Target B2M Sequence complement
acatcaacatcttggtcagatt

SEQ ID NO: 19759 - DNA, 22 bp, Artificial Sequence
  Target B2M Sequence complement
catcaacatcttggtcagattt

SEQ ID NO: 19760 - DNA, 22 bp, Artificial Sequence
  Target B2M Sequence complement
atcaacatcttggtcagatttg

SEQ ID NO: 19761 - DNA, 22 bp, Artificial Sequence
  Target B2M Sequence complement
tcaacatcttggtcagatttga

SEQ ID NO: 19762 - DNA, 22 bp, Artificial Sequence
  Target B2M Sequence complement
caacatcttggtcagatttgaa

SEQ ID NO: 19763 - DNA, 22 bp, Artificial Sequence
  Target B2M Sequence complement
aacatcttggtcagatttgaac

SEQ ID NO: 19764 - DNA, 22 bp, Artificial Sequence
  Target B2M Sequence complement
acatcttggtcagatttgaact

SEQ ID NO: 19765 - DNA, 22 bp, Artificial Sequence
  Target B2M Sequence complement
catcttggtcagatttgaactc

SEQ ID NO: 19766 - DNA, 22 bp, Artificial Sequence
  Target B2M Sequence complement
atcttggtcagatttgaactct

SEQ ID NO: 19767 - DNA, 22 bp, Artificial Sequence
  Target B2M Sequence complement
tcttggtcagatttgaactctt

SEQ ID NO: 19768 - DNA, 22 bp, Artificial Sequence
  Target B2M Sequence complement
cttggtcagatttgaactcttc

SEQ ID NO: 19769 - DNA, 22 bp, Artificial Sequence
  Target B2M Sequence complement
ttggtcagatttgaactcttca

SEQ ID NO: 19770 - DNA, 22 bp, Artificial Sequence
  Target B2M Sequence complement
tggtcagatttgaactcttcaa

SEQ ID NO: 19771 - DNA, 22 bp, Artificial Sequence
  Target B2M Sequence complement
ggtcagatttgaactcttcaat

SEQ ID NO: 19772 - DNA, 22 bp, Artificial Sequence
  Target B2M Sequence complement
gtcagatttgaactcttcaatc

SEQ ID NO: 19773 - DNA, 22 bp, Artificial Sequence
  Target B2M Sequence complement
tcagatttgaactcttcaatct

SEQ ID NO: 19774 - DNA, 22 bp, Artificial Sequence
  Target B2M Sequence complement
cagatttgaactcttcaatctc

SEQ ID NO: 19775 - DNA, 22 bp, Artificial Sequence
  Target B2M Sequence complement
agatttgaactcttcaatctct

SEQ ID NO: 19776 - DNA, 22 bp, Artificial Sequence
  Target B2M Sequence complement
gatttgaactcttcaatctctt

SEQ ID NO: 19777 - DNA, 22 bp, Artificial Sequence
  Target B2M Sequence complement
atttgaactcttcaatctcttg

SEQ ID NO: 19778 - DNA, 22 bp, Artificial Sequence
  Target B2M Sequence complement
tttgaactcttcaatctcttgc

SEQ ID NO: 19779 - DNA, 22 bp, Artificial Sequence
  Target B2M Sequence complement
ttgaactcttcaatctcttgca

SEQ ID NO: 19780 - DNA, 22 bp, Artificial Sequence
  Target B2M Sequence complement
tgaactcttcaatctcttgcac

SEQ ID NO: 19781 - DNA, 22 bp, Artificial Sequence
  Target B2M Sequence complement
gaactcttcaatctcttgcact

SEQ ID NO: 19782 - DNA, 22 bp, Artificial Sequence
  Target B2M Sequence complement
aactcttcaatctcttgcactc

SEQ ID NO: 19783 - DNA, 22 bp, Artificial Sequence
  Target B2M Sequence complement
actcttcaatctcttgcactca

SEQ ID NO: 19784 - DNA, 22 bp, Artificial Sequence
  Target B2M Sequence complement
ctcttcaatctcttgcactcaa

SEQ ID NO: 19785 - DNA, 22 bp, Artificial Sequence
  Target B2M Sequence complement
tcttcaatctcttgcactcaaa

SEQ ID NO: 19786 - DNA, 22 bp, Artificial Sequence
  Target B2M Sequence complement
cttcaatctcttgcactcaaag

SEQ ID NO: 19787 - DNA, 22 bp, Artificial Sequence
  Target B2M Sequence complement
ttcaatctcttgcactcaaagc

SEQ ID NO: 19788 - DNA, 22 bp, Artificial Sequence
  Target B2M Sequence complement
tcaatctcttgcactcaaagct

SEQ ID NO: 19789 - DNA, 22 bp, Artificial Sequence
  Target B2M Sequence complement
caatctcttgcactcaaagctt

SEQ ID NO: 19790 - DNA, 22 bp, Artificial Sequence
  Target B2M Sequence complement
aatctcttgcactcaaagcttg

SEQ ID NO: 19791 - DNA, 22 bp, Artificial Sequence
  Target B2M Sequence complement
atctcttgcactcaaagcttgt

SEQ ID NO: 19792 - DNA, 22 bp, Artificial Sequence
  Target B2M Sequence complement
tctcttgcactcaaagcttgtt

SEQ ID NO: 19793 - DNA, 22 bp, Artificial Sequence
  Target B2M Sequence complement
ctcttgcactcaaagcttgtta

SEQ ID NO: 19794 - DNA, 22 bp, Artificial Sequence
  Target B2M Sequence complement
tcttgcactcaaagcttgttaa

SEQ ID NO: 19795 - DNA, 22 bp, Artificial Sequence
  Target B2M Sequence complement
cttgcactcaaagcttgttaag

SEQ ID NO: 19796 - DNA, 22 bp, Artificial Sequence
  Target B2M Sequence complement
ttgcactcaaagcttgttaaga

SEQ ID NO: 19797 - DNA, 22 bp, Artificial Sequence
  Target B2M Sequence complement
tgcactcaaagcttgttaagat

SEQ ID NO: 19798 - DNA, 22 bp, Artificial Sequence
  Target B2M Sequence complement
gcactcaaagcttgttaagata

SEQ ID NO: 19799 - DNA, 22 bp, Artificial Sequence
  Target B2M Sequence complement
cactcaaagcttgttaagatag

SEQ ID NO: 19800 - DNA, 22 bp, Artificial Sequence
  Target B2M Sequence complement
actcaaagcttgttaagatagt

SEQ ID NO: 19801 - DNA, 22 bp, Artificial Sequence
  Target B2M Sequence complement
ctcaaagcttgttaagatagtt

SEQ ID NO: 19802 - DNA, 22 bp, Artificial Sequence
  Target B2M Sequence complement
tcaaagcttgttaagatagtta

SEQ ID NO: 19803 - DNA, 22 bp, Artificial Sequence
  Target B2M Sequence complement
caaagcttgttaagatagttaa

SEQ ID NO: 19804 - DNA, 22 bp, Artificial Sequence
  Target B2M Sequence complement
aaagcttgttaagatagttaag

SEQ ID NO: 19805 - DNA, 22 bp, Artificial Sequence
  Target B2M Sequence complement
aagcttgttaagatagttaagc

SEQ ID NO: 19806 - DNA, 22 bp, Artificial Sequence
  Target B2M Sequence complement
agcttgttaagatagttaagcg

SEQ ID NO: 19807 - DNA, 22 bp, Artificial Sequence
  Target B2M Sequence complement
gcttgttaagatagttaagcgt

SEQ ID NO: 19808 - DNA, 22 bp, Artificial Sequence
  Target B2M Sequence complement
cttgttaagatagttaagcgtg

SEQ ID NO: 19809 - DNA, 22 bp, Artificial Sequence
  Target B2M Sequence complement
ttgttaagatagttaagcgtgc

SEQ ID NO: 19810 - DNA, 22 bp, Artificial Sequence
  Target B2M Sequence complement
tgttaagatagttaagcgtgca

SEQ ID NO: 19811 - DNA, 22 bp, Artificial Sequence
  Target B2M Sequence complement
gttaagatagttaagcgtgcat

SEQ ID NO: 19812 - DNA, 22 bp, Artificial Sequence
  Target B2M Sequence complement
ttaagatagttaagcgtgcata

SEQ ID NO: 19813 - DNA, 22 bp, Artificial Sequence
  Target B2M Sequence complement
taagatagttaagcgtgcataa

SEQ ID NO: 19814 - DNA, 22 bp, Artificial Sequence
  Target B2M Sequence complement
aagatagttaagcgtgcataag

SEQ ID NO: 19815 - DNA, 22 bp, Artificial Sequence
  Target B2M Sequence complement
agatagttaagcgtgcataagt

SEQ ID NO: 19816 - DNA, 22 bp, Artificial Sequence
  Target B2M Sequence complement
gatagttaagcgtgcataagtt

SEQ ID NO: 19817 - DNA, 22 bp, Artificial Sequence
  Target B2M Sequence complement
atagttaagcgtgcataagtta

SEQ ID NO: 19818 - DNA, 22 bp, Artificial Sequence
  Target B2M Sequence complement
tagttaagcgtgcataagttaa

SEQ ID NO: 19819 - DNA, 22 bp, Artificial Sequence
  Target B2M Sequence complement
agttaagcgtgcataagttaac

SEQ ID NO: 19820 - DNA, 22 bp, Artificial Sequence
  Target B2M Sequence complement
gttaagcgtgcataagttaact

SEQ ID NO: 19821 - DNA, 22 bp, Artificial Sequence
  Target B2M Sequence complement
ttaagcgtgcataagttaactt

SEQ ID NO: 19822 - DNA, 22 bp, Artificial Sequence
  Target B2M Sequence complement
taagcgtgcataagttaacttc

SEQ ID NO: 19823 - DNA, 22 bp, Artificial Sequence
  Target B2M Sequence complement
aagcgtgcataagttaacttcc

SEQ ID NO: 19824 - DNA, 22 bp, Artificial Sequence
  Target B2M Sequence complement
agcgtgcataagttaacttcca

SEQ ID NO: 19825 - DNA, 22 bp, Artificial Sequence
  Target B2M Sequence complement
gcgtgcataagttaacttccaa

SEQ ID NO: 19826 - DNA, 22 bp, Artificial Sequence
  Target B2M Sequence complement
cgtgcataagttaacttccaat

SEQ ID NO: 19827 - DNA, 22 bp, Artificial Sequence
  Target B2M Sequence complement
gtgcataagttaacttccaatt

SEQ ID NO: 19828 - DNA, 22 bp, Artificial Sequence
  Target B2M Sequence complement
tgcataagttaacttccaattt

SEQ ID NO: 19829 - DNA, 22 bp, Artificial Sequence
  Target B2M Sequence complement
gcataagttaacttccaattta

SEQ ID NO: 19830 - DNA, 22 bp, Artificial Sequence
  Target B2M Sequence complement
cataagttaacttccaatttac

SEQ ID NO: 19831 - DNA, 22 bp, Artificial Sequence
  Target B2M Sequence complement
agttaacttccaatttacatac

SEQ ID NO: 19832 - DNA, 22 bp, Artificial Sequence
  Target B2M Sequence complement
gttaacttccaatttacatact

SEQ ID NO: 19833 - DNA, 22 bp, Artificial Sequence
  Target B2M Sequence complement
ttaacttccaatttacatactc

SEQ ID NO: 19834 - DNA, 22 bp, Artificial Sequence
  Target B2M Sequence complement
taacttccaatttacatactct

SEQ ID NO: 19835 - DNA, 22 bp, Artificial Sequence
  Target B2M Sequence complement
aacttccaatttacatactctg

SEQ ID NO: 19836 - DNA, 22 bp, Artificial Sequence
  Target B2M Sequence complement
acttccaatttacatactctgc

SEQ ID NO: 19837 - DNA, 22 bp, Artificial Sequence
  Target B2M Sequence complement
cttccaatttacatactctgct

SEQ ID NO: 19838 - DNA, 22 bp, Artificial Sequence
  Target B2M Sequence complement
ttccaatttacatactctgctt

SEQ ID NO: 19839 - DNA, 22 bp, Artificial Sequence
  Target B2M Sequence complement
tccaatttacatactctgctta

SEQ ID NO: 19840 - DNA, 22 bp, Artificial Sequence
  Target B2M Sequence complement
ccaatttacatactctgcttag

SEQ ID NO: 19841 - DNA, 22 bp, Artificial Sequence
  Target B2M Sequence complement
caatttacatactctgcttaga

SEQ ID NO: 19842 - DNA, 22 bp, Artificial Sequence
  Target B2M Sequence complement
aatttacatactctgcttagaa

SEQ ID NO: 19843 - DNA, 22 bp, Artificial Sequence
  Target B2M Sequence complement
atttacatactctgcttagaat

SEQ ID NO: 19844 - DNA, 22 bp, Artificial Sequence
  Target B2M Sequence complement
tttacatactctgcttagaatt

SEQ ID NO: 19845 - DNA, 22 bp, Artificial Sequence
  Target B2M Sequence complement
ttacatactctgcttagaattt

SEQ ID NO: 19846 - DNA, 22 bp, Artificial Sequence
  Target B2M Sequence complement
tacatactctgcttagaatttg

SEQ ID NO: 19847 - DNA, 22 bp, Artificial Sequence
  Target B2M Sequence complement
acatactctgcttagaatttgg

SEQ ID NO: 19848 - DNA, 22 bp, Artificial Sequence
  Target B2M Sequence complement
catactctgcttagaatttggg

SEQ ID NO: 19849 - DNA, 22 bp, Artificial Sequence
  Target B2M Sequence complement
atataattgacaggattattgg

SEQ ID NO: 19850 - DNA, 22 bp, Artificial Sequence
  Target B2M Sequence complement
tataattgacaggattattgga

SEQ ID NO: 19851 - DNA, 22 bp, Artificial Sequence
  Target B2M Sequence complement
ataattgacaggattattggaa

SEQ ID NO: 19852 - DNA, 22 bp, Artificial Sequence
  Target B2M Sequence complement
taattgacaggattattggaaa

SEQ ID NO: 19853 - DNA, 22 bp, Artificial Sequence
  Target B2M Sequence complement
aattgacaggattattggaaat

SEQ ID NO: 19854 - DNA, 22 bp, Artificial Sequence
  Target B2M Sequence complement
attgacaggattattggaaatt

SEQ ID NO: 19855 - DNA, 22 bp, Artificial Sequence
  Target B2M Sequence complement
ttgacaggattattggaaattt

SEQ ID NO: 19856 - DNA, 22 bp, Artificial Sequence
  Target B2M Sequence complement
tgacaggattattggaaatttg

SEQ ID NO: 19857 - DNA, 22 bp, Artificial Sequence
  Target B2M Sequence complement
gacaggattattggaaatttgt

SEQ ID NO: 19858 - DNA, 22 bp, Artificial Sequence
  Target B2M Sequence complement
acaggattattggaaatttgtt

SEQ ID NO: 19859 - DNA, 22 bp, Artificial Sequence
  Target B2M Sequence complement
caggattattggaaatttgtta

SEQ ID NO: 19860 - DNA, 22 bp, Artificial Sequence
  Target B2M Sequence complement
tatacatttgataaagtaaggc

SEQ ID NO: 19861 - DNA, 22 bp, Artificial Sequence
  Target B2M Sequence complement
atacatttgataaagtaaggca

SEQ ID NO: 19862 - DNA, 22 bp, Artificial Sequence
  Target B2M Sequence complement
tacatttgataaagtaaggcat

SEQ ID NO: 19863 - DNA, 22 bp, Artificial Sequence
  Target B2M Sequence complement
acatttgataaagtaaggcatg

SEQ ID NO: 19864 - DNA, 22 bp, Artificial Sequence
  Target B2M Sequence complement
catttgataaagtaaggcatgg

SEQ ID NO: 19865 - DNA, 22 bp, Artificial Sequence
  Target B2M Sequence complement
atttgataaagtaaggcatggt

SEQ ID NO: 19866 - DNA, 22 bp, Artificial Sequence
  Target B2M Sequence complement
tttgataaagtaaggcatggtt

SEQ ID NO: 19867 - DNA, 22 bp, Artificial Sequence
  Target B2M Sequence complement
ttgataaagtaaggcatggttg

SEQ ID NO: 19868 - DNA, 22 bp, Artificial Sequence
  Target B2M Sequence complement
tgataaagtaaggcatggttgt

SEQ ID NO: 19869 - DNA, 22 bp, Artificial Sequence
  Target B2M Sequence complement
gataaagtaaggcatggttgtg

SEQ ID NO: 19870 - DNA, 22 bp, Artificial Sequence
  Target B2M Sequence complement
ataaagtaaggcatggttgtgg

SEQ ID NO: 19871 - DNA, 22 bp, Artificial Sequence
  Target B2M Sequence complement
taaagtaaggcatggttgtggt

SEQ ID NO: 19872 - DNA, 22 bp, Artificial Sequence
  Target B2M Sequence complement
aaagtaaggcatggttgtggtt

SEQ ID NO: 19873 - DNA, 22 bp, Artificial Sequence
  Target B2M Sequence complement
aagtaaggcatggttgtggtta

SEQ ID NO: 19874 - DNA, 22 bp, Artificial Sequence
  Target B2M Sequence complement
agtaaggcatggttgtggttaa

SEQ ID NO: 19875 - DNA, 22 bp, Artificial Sequence
  Target B2M Sequence complement
gtaaggcatggttgtggttaat

SEQ ID NO: 19876 - DNA, 22 bp, Artificial Sequence
  Target B2M Sequence complement
taaggcatggttgtggttaatc

SEQ ID NO: 19877 - DNA, 22 bp, Artificial Sequence
  Target B2M Sequence complement
aaggcatggttgtggttaatct

SEQ ID NO: 19878 - DNA, 22 bp, Artificial Sequence
  Target B2M Sequence complement
aggcatggttgtggttaatctg

SEQ ID NO: 19879 - DNA, 22 bp, Artificial Sequence
  Target B2M Sequence complement
ggcatggttgtggttaatctgg

SEQ ID NO: 19880 - DNA, 22 bp, Artificial Sequence
  Target B2M Sequence complement
gcatggttgtggttaatctggt

SEQ ID NO: 19881 - DNA, 22 bp, Artificial Sequence
  Target B2M Sequence complement
catggttgtggttaatctggtt

SEQ ID NO: 19882 - DNA, 22 bp, Artificial Sequence
  Target B2M Sequence complement
atggttgtggttaatctggttt

SEQ ID NO: 19883 - DNA, 22 bp, Artificial Sequence
  Target B2M Sequence complement
tggttgtggttaatctggttta

SEQ ID NO: 19884 - DNA, 22 bp, Artificial Sequence
  Target B2M Sequence complement
ggttgtggttaatctggtttat

SEQ ID NO: 19885 - DNA, 22 bp, Artificial Sequence
  Target B2M Sequence complement
gttgtggttaatctggtttatt

SEQ ID NO: 19886 - DNA, 22 bp, Artificial Sequence
  Target B2M Sequence complement
ttgtggttaatctggtttattt

SEQ ID NO: 19887 - DNA, 22 bp, Artificial Sequence
  Target B2M Sequence complement
tgttccacaagttaaataaatc

SEQ ID NO: 19888 - DNA, 22 bp, Artificial Sequence
  Target B2M Sequence complement
gttccacaagttaaataaatca

SEQ ID NO: 19889 - DNA, 18 bp, Artificial Sequence
  Target B2M Sequence complement
attcgggccgagatgtct

SEQ ID NO: 19890 - DNA, 18 bp, Artificial Sequence
  Target B2M Sequence complement
tggagagagaattgaaaa

SEQ ID NO: 19891 - DNA, 18 bp, Artificial Sequence
  Target B2M Sequence complement
ggagagagaattgaaaaa

SEQ ID NO: 19892 - DNA, 18 bp, Artificial Sequence
  Target B2M Sequence complement
gagagagaattgaaaaag

SEQ ID NO: 19893 - DNA, 18 bp, Artificial Sequence
  Target B2M Sequence complement
agagagaattgaaaaagt

SEQ ID NO: 19894 - DNA, 18 bp, Artificial Sequence
  Target B2M Sequence complement
gagagaattgaaaaagtg

SEQ ID NO: 19895 - DNA, 18 bp, Artificial Sequence
  Target B2M Sequence complement
agagaattgaaaaagtgg

SEQ ID NO: 19896 - DNA, 18 bp, Artificial Sequence
  Target B2M Sequence complement
gagaattgaaaaagtgga

SEQ ID NO: 19897 - DNA, 18 bp, Artificial Sequence
  Target B2M Sequence complement
agaattgaaaaagtggag

SEQ ID NO: 19898 - DNA, 18 bp, Artificial Sequence
  Target B2M Sequence complement
gaattgaaaaagtggagc

SEQ ID NO: 19899 - DNA, 18 bp, Artificial Sequence
  Target B2M Sequence complement
aattgaaaaagtggagca

SEQ ID NO: 19900 - DNA, 18 bp, Artificial Sequence
  Target B2M Sequence complement
attgaaaaagtggagcat

SEQ ID NO: 19901 - DNA, 18 bp, Artificial Sequence
  Target B2M Sequence complement
ttgaaaaagtggagcatt

SEQ ID NO: 19902 - DNA, 18 bp, Artificial Sequence
  Target B2M Sequence complement
tgaaaaagtggagcattc

SEQ ID NO: 19903 - DNA, 18 bp, Artificial Sequence
  Target B2M Sequence complement
gaaaaagtggagcattca

SEQ ID NO: 19904 - DNA, 18 bp, Artificial Sequence
  Target B2M Sequence complement
aaaaagtggagcattcag

SEQ ID NO: 19905 - DNA, 18 bp, Artificial Sequence
  Target B2M Sequence complement
aaaagtggagcattcaga

SEQ ID NO: 19906 - DNA, 18 bp, Artificial Sequence
  Target B2M Sequence complement
ctacactgaattcacccc

SEQ ID NO: 19907 - DNA, 18 bp, Artificial Sequence
  Target B2M Sequence complement
tacactgaattcaccccc

SEQ ID NO: 19908 - DNA, 18 bp, Artificial Sequence
  Target B2M Sequence complement
acactgaattcaccccca

SEQ ID NO: 19909 - DNA, 18 bp, Artificial Sequence
  Target B2M Sequence complement
cactgaattcacccccac

SEQ ID NO: 19910 - DNA, 18 bp, Artificial Sequence
  Target B2M Sequence complement
actgaattcacccccact

SEQ ID NO: 19911 - DNA, 18 bp, Artificial Sequence
  Target B2M Sequence complement
ctgaattcacccccactg

SEQ ID NO: 19912 - DNA, 18 bp, Artificial Sequence
  Target B2M Sequence complement
tgaattcacccccactga

SEQ ID NO: 19913 - DNA, 18 bp, Artificial Sequence
  Target B2M Sequence complement
gaattcacccccactgaa

SEQ ID NO: 19914 - DNA, 18 bp, Artificial Sequence
  Target B2M Sequence complement
aattcacccccactgaaa

SEQ ID NO: 19915 - DNA, 18 bp, Artificial Sequence
  Target B2M Sequence complement
attcacccccactgaaaa

SEQ ID NO: 19916 - DNA, 18 bp, Artificial Sequence
  Target B2M Sequence complement
ttcacccccactgaaaaa

SEQ ID NO: 19917 - DNA, 18 bp, Artificial Sequence
  Target B2M Sequence complement
tcacccccactgaaaaag

SEQ ID NO: 19918 - DNA, 18 bp, Artificial Sequence
  Target B2M Sequence complement
cacccccactgaaaaaga

SEQ ID NO: 19919 - DNA, 18 bp, Artificial Sequence
  Target B2M Sequence complement
acccccactgaaaaagat

SEQ ID NO: 19920 - DNA, 18 bp, Artificial Sequence
  Target B2M Sequence complement
cccccactgaaaaagatg

SEQ ID NO: 19921 - DNA, 18 bp, Artificial Sequence
  Target B2M Sequence complement
ccccactgaaaaagatga

SEQ ID NO: 19922 - DNA, 18 bp, Artificial Sequence
  Target B2M Sequence complement
cccactgaaaaagatgag

SEQ ID NO: 19923 - DNA, 18 bp, Artificial Sequence
  Target B2M Sequence complement
ccactgaaaaagatgagt

SEQ ID NO: 19924 - DNA, 18 bp, Artificial Sequence
  Target B2M Sequence complement
cactgaaaaagatgagta

SEQ ID NO: 19925 - DNA, 18 bp, Artificial Sequence
  Target B2M Sequence complement
actgaaaaagatgagtat

SEQ ID NO: 19926 - DNA, 18 bp, Artificial Sequence
  Target B2M Sequence complement
ctgaaaaagatgagtatg

SEQ ID NO: 19927 - DNA, 18 bp, Artificial Sequence
  Target B2M Sequence complement
tgaaaaagatgagtatgc

SEQ ID NO: 19928 - DNA, 18 bp, Artificial Sequence
  Target B2M Sequence complement
gaaaaagatgagtatgcc

SEQ ID NO: 19929 - DNA, 18 bp, Artificial Sequence
  Target B2M Sequence complement
aaaaagatgagtatgcct

SEQ ID NO: 19930 - DNA, 18 bp, Artificial Sequence
  Target B2M Sequence complement
aaaagatgagtatgcctg

SEQ ID NO: 19931 - DNA, 18 bp, Artificial Sequence
  Target B2M Sequence complement
ttctgcttgcttgctttt

SEQ ID NO: 19932 - DNA, 18 bp, Artificial Sequence
  Target B2M Sequence complement
tctgcttgcttgcttttt

SEQ ID NO: 19933 - DNA, 18 bp, Artificial Sequence
  Target B2M Sequence complement
ctgcttgcttgcttttta

SEQ ID NO: 19934 - DNA, 18 bp, Artificial Sequence
  Target B2M Sequence complement
tgcttgcttgctttttaa

SEQ ID NO: 19935 - DNA, 18 bp, Artificial Sequence
  Target B2M Sequence complement
gcttgcttgctttttaat

SEQ ID NO: 19936 - DNA, 18 bp, Artificial Sequence
  Target B2M Sequence complement
cttgcttgctttttaata

SEQ ID NO: 19937 - DNA, 18 bp, Artificial Sequence
  Target B2M Sequence complement
gcttgctttttaatattg

SEQ ID NO: 19938 - DNA, 18 bp, Artificial Sequence
  Target B2M Sequence complement
tacactttatgcacaaaa

SEQ ID NO: 19939 - DNA, 18 bp, Artificial Sequence
  Target B2M Sequence complement
acactttatgcacaaaat

SEQ ID NO: 19940 - DNA, 18 bp, Artificial Sequence
  Target B2M Sequence complement
cactttatgcacaaaatg

SEQ ID NO: 19941 - DNA, 18 bp, Artificial Sequence
  Target B2M Sequence complement
actttatgcacaaaatgt

SEQ ID NO: 19942 - DNA, 18 bp, Artificial Sequence
  Target B2M Sequence complement
ctttatgcacaaaatgta

SEQ ID NO: 19943 - DNA, 18 bp, Artificial Sequence
  Target B2M Sequence complement
tttatgcacaaaatgtag

SEQ ID NO: 19944 - DNA, 18 bp, Artificial Sequence
  Target B2M Sequence complement
ttatgcacaaaatgtagg

SEQ ID NO: 19945 - DNA, 18 bp, Artificial Sequence
  Target B2M Sequence complement
tatgcacaaaatgtaggg

SEQ ID NO: 19946 - DNA, 18 bp, Artificial Sequence
  Target B2M Sequence complement
atgcacaaaatgtagggt

SEQ ID NO: 19947 - DNA, 18 bp, Artificial Sequence
  Target B2M Sequence complement
tgcacaaaatgtagggtt

SEQ ID NO: 19948 - DNA, 18 bp, Artificial Sequence
  Target B2M Sequence complement
gcacaaaatgtagggtta

SEQ ID NO: 19949 - DNA, 18 bp, Artificial Sequence
  Target B2M Sequence complement
cacaaaatgtagggttat

SEQ ID NO: 19950 - DNA, 18 bp, Artificial Sequence
  Target B2M Sequence complement
acaaaatgtagggttata

SEQ ID NO: 19951 - DNA, 18 bp, Artificial Sequence
  Target B2M Sequence complement
caaaatgtagggttataa

SEQ ID NO: 19952 - DNA, 18 bp, Artificial Sequence
  Target B2M Sequence complement
gcaacttagaggtgggga

SEQ ID NO: 19953 - DNA, 18 bp, Artificial Sequence
  Target B2M Sequence complement
caacttagaggtggggag

SEQ ID NO: 19954 - DNA, 18 bp, Artificial Sequence
  Target B2M Sequence complement
aacttagaggtggggagc

SEQ ID NO: 19955 - DNA, 18 bp, Artificial Sequence
  Target B2M Sequence complement
acttagaggtggggagca

SEQ ID NO: 19956 - DNA, 18 bp, Artificial Sequence
  Target B2M Sequence complement
ttagaggtggggagcaga

SEQ ID NO: 19957 - DNA, 18 bp, Artificial Sequence
  Target B2M Sequence complement
aggtggggagcagagaat

SEQ ID NO: 19958 - DNA, 18 bp, Artificial Sequence
  Target B2M Sequence complement
ggtggggagcagagaatt

SEQ ID NO: 19959 - DNA, 18 bp, Artificial Sequence
  Target B2M Sequence complement
gtggggagcagagaattc

SEQ ID NO: 19960 - DNA, 18 bp, Artificial Sequence
  Target B2M Sequence complement
tggggagcagagaattct

SEQ ID NO: 19961 - DNA, 18 bp, Artificial Sequence
  Target B2M Sequence complement
ggggagcagagaattctc

SEQ ID NO: 19962 - DNA, 18 bp, Artificial Sequence
  Target B2M Sequence complement
tctgcttagaatttgggg

SEQ ID NO: 19963 - DNA, 18 bp, Artificial Sequence
  Target B2M Sequence complement
ctgcttagaatttggggg

SEQ ID NO: 19964 - DNA, 18 bp, Artificial Sequence
  Target B2M Sequence complement
tgcttagaatttggggga

SEQ ID NO: 19965 - DNA, 18 bp, Artificial Sequence
  Target B2M Sequence complement
gcttagaatttgggggaa

SEQ ID NO: 19966 - DNA, 18 bp, Artificial Sequence
  Target B2M Sequence complement
cttagaatttgggggaaa

SEQ ID NO: 19967 - DNA, 18 bp, Artificial Sequence
  Target B2M Sequence complement
ttagaatttgggggaaaa

SEQ ID NO: 19968 - DNA, 18 bp, Artificial Sequence
  Target B2M Sequence complement
tagaatttgggggaaaat

SEQ ID NO: 19969 - DNA, 18 bp, Artificial Sequence
  Target B2M Sequence complement
agaatttgggggaaaatt

SEQ ID NO: 19970 - DNA, 18 bp, Artificial Sequence
  Target B2M Sequence complement
gaatttgggggaaaattt

SEQ ID NO: 19971 - DNA, 18 bp, Artificial Sequence
  Target B2M Sequence complement
aatttgggggaaaattta

SEQ ID NO: 19972 - DNA, 18 bp, Artificial Sequence
  Target B2M Sequence complement
atttgggggaaaatttag

SEQ ID NO: 19973 - DNA, 18 bp, Artificial Sequence
  Target B2M Sequence complement
tttgggggaaaatttaga

SEQ ID NO: 19974 - DNA, 18 bp, Artificial Sequence
  Target B2M Sequence complement
ttgggggaaaatttagaa

SEQ ID NO: 19975 - DNA, 18 bp, Artificial Sequence
  Target B2M Sequence complement
tgggggaaaatttagaaa

SEQ ID NO: 19976 - DNA, 18 bp, Artificial Sequence
  Target B2M Sequence complement
gggggaaaatttagaaat

SEQ ID NO: 19977 - DNA, 18 bp, Artificial Sequence
  Target B2M Sequence complement
ggggaaaatttagaaata

SEQ ID NO: 19978 - DNA, 18 bp, Artificial Sequence
  Target B2M Sequence complement
tgaatgaaacattttgtc

SEQ ID NO: 19979 - DNA, 18 bp, Artificial Sequence
  Target B2M Sequence complement
gaatgaaacattttgtca

SEQ ID NO: 19980 - DNA, 18 bp, Artificial Sequence
  Target B2M Sequence complement
tctggtttatttttgttc

SEQ ID NO: 19981 - DNA, 18 bp, Artificial Sequence
  Target B2M Sequence complement
ctggtttatttttgttcc

SEQ ID NO: 19982 - DNA, 18 bp, Artificial Sequence
  Target B2M Sequence complement
tggtttatttttgttcca

SEQ ID NO: 19983 - DNA, 18 bp, Artificial Sequence
  Target B2M Sequence complement
ggtttatttttgttccac

SEQ ID NO: 19984 - DNA, 18 bp, Artificial Sequence
  Target B2M Sequence complement
gtttatttttgttccaca

SEQ ID NO: 19985 - DNA, 18 bp, Artificial Sequence
  Target B2M Sequence complement
ttatttttgttccacaag

SEQ ID NO: 19986 - DNA, 18 bp, Artificial Sequence
  Target B2M Sequence complement
tatttttgttccacaagt

SEQ ID NO: 19987 - DNA, 18 bp, Artificial Sequence
  Target B2M Sequence complement
atttttgttccacaagtt

SEQ ID NO: 19988 - DNA, 18 bp, Artificial Sequence
  Target B2M Sequence complement
tttttgttccacaagtta

SEQ ID NO: 19989 - DNA, 18 bp, Artificial Sequence
  Target B2M Sequence complement
ttttgttccacaagttaa

SEQ ID NO: 19990 - DNA, 19 bp, Artificial Sequence
  Target B2M Sequence complement
acagcattcgggccgagat

SEQ ID NO: 19991 - DNA, 19 bp, Artificial Sequence
  Target B2M Sequence complement
agcattcgggccgagatgt

SEQ ID NO: 19992 - DNA, 19 bp, Artificial Sequence
  Target B2M Sequence complement
cattcgggccgagatgtct

SEQ ID NO: 19993 - DNA, 19 bp, Artificial Sequence
  Target B2M Sequence complement
attcgggccgagatgtctc

SEQ ID NO: 19994 - DNA, 19 bp, Artificial Sequence
  Target B2M Sequence complement
atggagagagaattgaaaa

SEQ ID NO: 19995 - DNA, 19 bp, Artificial Sequence
  Target B2M Sequence complement
tggagagagaattgaaaaa

SEQ ID NO: 19996 - DNA, 19 bp, Artificial Sequence
  Target B2M Sequence complement
ggagagagaattgaaaaag

SEQ ID NO: 19997 - DNA, 19 bp, Artificial Sequence
  Target B2M Sequence complement
gagagagaattgaaaaagt

SEQ ID NO: 19998 - DNA, 19 bp, Artificial Sequence
  Target B2M Sequence complement
agagagaattgaaaaagtg

SEQ ID NO: 19999 - DNA, 19 bp, Artificial Sequence
  Target B2M Sequence complement
gagagaattgaaaaagtgg

SEQ ID NO: 20000 - DNA, 19 bp, Artificial Sequence
  Target B2M Sequence complement
agagaattgaaaaagtgga

SEQ ID NO: 20001 - DNA, 19 bp, Artificial Sequence
  Target B2M Sequence complement
gagaattgaaaaagtggag

SEQ ID NO: 20002 - DNA, 19 bp, Artificial Sequence
  Target B2M Sequence complement
agaattgaaaaagtggagc

SEQ ID NO: 20003 - DNA, 19 bp, Artificial Sequence
  Target B2M Sequence complement
gaattgaaaaagtggagca

SEQ ID NO: 20004 - DNA, 19 bp, Artificial Sequence
  Target B2M Sequence complement
aattgaaaaagtggagcat

SEQ ID NO: 20005 - DNA, 19 bp, Artificial Sequence
  Target B2M Sequence complement
attgaaaaagtggagcatt

SEQ ID NO: 20006 - DNA, 19 bp, Artificial Sequence
  Target B2M Sequence complement
ttgaaaaagtggagcattc

SEQ ID NO: 20007 - DNA, 19 bp, Artificial Sequence
  Target B2M Sequence complement
tgaaaaagtggagcattca

SEQ ID NO: 20008 - DNA, 19 bp, Artificial Sequence
  Target B2M Sequence complement
gaaaaagtggagcattcag

SEQ ID NO: 20009 - DNA, 19 bp, Artificial Sequence
  Target B2M Sequence complement
aaaaagtggagcattcaga

SEQ ID NO: 20010 - DNA, 19 bp, Artificial Sequence
  Target B2M Sequence complement
aaaagtggagcattcagac

SEQ ID NO: 20011 - DNA, 19 bp, Artificial Sequence
  Target B2M Sequence complement
actacactgaattcacccc

SEQ ID NO: 20012 - DNA, 19 bp, Artificial Sequence
  Target B2M Sequence complement
ctacactgaattcaccccc

SEQ ID NO: 20013 - DNA, 19 bp, Artificial Sequence
  Target B2M Sequence complement
tacactgaattcaccccca

SEQ ID NO: 20014 - DNA, 19 bp, Artificial Sequence
  Target B2M Sequence complement
acactgaattcacccccac

SEQ ID NO: 20015 - DNA, 19 bp, Artificial Sequence
  Target B2M Sequence complement
cactgaattcacccccact

SEQ ID NO: 20016 - DNA, 19 bp, Artificial Sequence
  Target B2M Sequence complement
actgaattcacccccactg

SEQ ID NO: 20017 - DNA, 19 bp, Artificial Sequence
  Target B2M Sequence complement
ctgaattcacccccactga

SEQ ID NO: 20018 - DNA, 19 bp, Artificial Sequence
  Target B2M Sequence complement
tgaattcacccccactgaa

SEQ ID NO: 20019 - DNA, 19 bp, Artificial Sequence
  Target B2M Sequence complement
gaattcacccccactgaaa

SEQ ID NO: 20020 - DNA, 19 bp, Artificial Sequence
  Target B2M Sequence complement
aattcacccccactgaaaa

SEQ ID NO: 20021 - DNA, 19 bp, Artificial Sequence
  Target B2M Sequence complement
attcacccccactgaaaaa

SEQ ID NO: 20022 - DNA, 19 bp, Artificial Sequence
  Target B2M Sequence complement
ttcacccccactgaaaaag

SEQ ID NO: 20023 - DNA, 19 bp, Artificial Sequence
  Target B2M Sequence complement
tcacccccactgaaaaaga

SEQ ID NO: 20024 - DNA, 19 bp, Artificial Sequence
  Target B2M Sequence complement
cacccccactgaaaaagat

SEQ ID NO: 20025 - DNA, 19 bp, Artificial Sequence
  Target B2M Sequence complement
acccccactgaaaaagatg

SEQ ID NO: 20026 - DNA, 19 bp, Artificial Sequence
  Target B2M Sequence complement
cccccactgaaaaagatga

SEQ ID NO: 20027 - DNA, 19 bp, Artificial Sequence
  Target B2M Sequence complement
ccccactgaaaaagatgag

SEQ ID NO: 20028 - DNA, 19 bp, Artificial Sequence
  Target B2M Sequence complement
cccactgaaaaagatgagt

SEQ ID NO: 20029 - DNA, 19 bp, Artificial Sequence
  Target B2M Sequence complement
ccactgaaaaagatgagta

SEQ ID NO: 20030 - DNA, 19 bp, Artificial Sequence
  Target B2M Sequence complement
cactgaaaaagatgagtat

SEQ ID NO: 20031 - DNA, 19 bp, Artificial Sequence
  Target B2M Sequence complement
actgaaaaagatgagtatg

SEQ ID NO: 20032 - DNA, 19 bp, Artificial Sequence
  Target B2M Sequence complement
ctgaaaaagatgagtatgc

SEQ ID NO: 20033 - DNA, 19 bp, Artificial Sequence
  Target B2M Sequence complement
tgaaaaagatgagtatgcc

SEQ ID NO: 20034 - DNA, 19 bp, Artificial Sequence
  Target B2M Sequence complement
gaaaaagatgagtatgcct

SEQ ID NO: 20035 - DNA, 19 bp, Artificial Sequence
  Target B2M Sequence complement
aaaaagatgagtatgcctg

SEQ ID NO: 20036 - DNA, 19 bp, Artificial Sequence
  Target B2M Sequence complement
aaaagatgagtatgcctgc

SEQ ID NO: 20037 - DNA, 19 bp, Artificial Sequence
  Target B2M Sequence complement
attctgcttgcttgctttt

SEQ ID NO: 20038 - DNA, 19 bp, Artificial Sequence
  Target B2M Sequence complement
ttctgcttgcttgcttttt

SEQ ID NO: 20039 - DNA, 19 bp, Artificial Sequence
  Target B2M Sequence complement
tctgcttgcttgcttttta

SEQ ID NO: 20040 - DNA, 19 bp, Artificial Sequence
  Target B2M Sequence complement
ctgcttgcttgctttttaa

SEQ ID NO: 20041 - DNA, 19 bp, Artificial Sequence
  Target B2M Sequence complement
tgcttgcttgctttttaat

SEQ ID NO: 20042 - DNA, 19 bp, Artificial Sequence
  Target B2M Sequence complement
gcttgcttgctttttaata

SEQ ID NO: 20043 - DNA, 19 bp, Artificial Sequence
  Target B2M Sequence complement
cttgcttgctttttaatat

SEQ ID NO: 20044 - DNA, 19 bp, Artificial Sequence
  Target B2M Sequence complement
tgcttgctttttaatattg

SEQ ID NO: 20045 - DNA, 19 bp, Artificial Sequence
  Target B2M Sequence complement
gcttgctttttaatattga

SEQ ID NO: 20046 - DNA, 19 bp, Artificial Sequence
  Target B2M Sequence complement
ttacactttatgcacaaaa

SEQ ID NO: 20047 - DNA, 19 bp, Artificial Sequence
  Target B2M Sequence complement
tacactttatgcacaaaat

SEQ ID NO: 20048 - DNA, 19 bp, Artificial Sequence
  Target B2M Sequence complement
acactttatgcacaaaatg

SEQ ID NO: 20049 - DNA, 19 bp, Artificial Sequence
  Target B2M Sequence complement
cactttatgcacaaaatgt

SEQ ID NO: 20050 - DNA, 19 bp, Artificial Sequence
  Target B2M Sequence complement
actttatgcacaaaatgta

SEQ ID NO: 20051 - DNA, 19 bp, Artificial Sequence
  Target B2M Sequence complement
ctttatgcacaaaatgtag

SEQ ID NO: 20052 - DNA, 19 bp, Artificial Sequence
  Target B2M Sequence complement
tttatgcacaaaatgtagg

SEQ ID NO: 20053 - DNA, 19 bp, Artificial Sequence
  Target B2M Sequence complement
ttatgcacaaaatgtaggg

SEQ ID NO: 20054 - DNA, 19 bp, Artificial Sequence
  Target B2M Sequence complement
tatgcacaaaatgtagggt

SEQ ID NO: 20055 - DNA, 19 bp, Artificial Sequence
  Target B2M Sequence complement
atgcacaaaatgtagggtt

SEQ ID NO: 20056 - DNA, 19 bp, Artificial Sequence
  Target B2M Sequence complement
tgcacaaaatgtagggtta

SEQ ID NO: 20057 - DNA, 19 bp, Artificial Sequence
  Target B2M Sequence complement
gcacaaaatgtagggttat

SEQ ID NO: 20058 - DNA, 19 bp, Artificial Sequence
  Target B2M Sequence complement
cacaaaatgtagggttata

SEQ ID NO: 20059 - DNA, 19 bp, Artificial Sequence
  Target B2M Sequence complement
acaaaatgtagggttataa

SEQ ID NO: 20060 - DNA, 19 bp, Artificial Sequence
  Target B2M Sequence complement
caaaatgtagggttataat

SEQ ID NO: 20061 - DNA, 19 bp, Artificial Sequence
  Target B2M Sequence complement
tggcaacttagaggtgggg

SEQ ID NO: 20062 - DNA, 19 bp, Artificial Sequence
  Target B2M Sequence complement
ggcaacttagaggtgggga

SEQ ID NO: 20063 - DNA, 19 bp, Artificial Sequence
  Target B2M Sequence complement
gcaacttagaggtggggag

SEQ ID NO: 20064 - DNA, 19 bp, Artificial Sequence
  Target B2M Sequence complement
caacttagaggtggggagc

SEQ ID NO: 20065 - DNA, 19 bp, Artificial Sequence
  Target B2M Sequence complement
aacttagaggtggggagca

SEQ ID NO: 20066 - DNA, 19 bp, Artificial Sequence
  Target B2M Sequence complement
acttagaggtggggagcag

SEQ ID NO: 20067 - DNA, 19 bp, Artificial Sequence
  Target B2M Sequence complement
cttagaggtggggagcaga

SEQ ID NO: 20068 - DNA, 19 bp, Artificial Sequence
  Target B2M Sequence complement
ttagaggtggggagcagag

SEQ ID NO: 20069 - DNA, 19 bp, Artificial Sequence
  Target B2M Sequence complement
tagaggtggggagcagaga

SEQ ID NO: 20070 - DNA, 19 bp, Artificial Sequence
  Target B2M Sequence complement
agaggtggggagcagagaa

SEQ ID NO: 20071 - DNA, 19 bp, Artificial Sequence
  Target B2M Sequence complement
gaggtggggagcagagaat

SEQ ID NO: 20072 - DNA, 19 bp, Artificial Sequence
  Target B2M Sequence complement
aggtggggagcagagaatt

SEQ ID NO: 20073 - DNA, 19 bp, Artificial Sequence
  Target B2M Sequence complement
ggtggggagcagagaattc

SEQ ID NO: 20074 - DNA, 19 bp, Artificial Sequence
  Target B2M Sequence complement
gtggggagcagagaattct

SEQ ID NO: 20075 - DNA, 19 bp, Artificial Sequence
  Target B2M Sequence complement
tggggagcagagaattctc

SEQ ID NO: 20076 - DNA, 19 bp, Artificial Sequence
  Target B2M Sequence complement
ggggagcagagaattctct

SEQ ID NO: 20077 - DNA, 19 bp, Artificial Sequence
  Target B2M Sequence complement
ctctgcttagaatttgggg

SEQ ID NO: 20078 - DNA, 19 bp, Artificial Sequence
  Target B2M Sequence complement
tctgcttagaatttggggg

SEQ ID NO: 20079 - DNA, 19 bp, Artificial Sequence
  Target B2M Sequence complement
ctgcttagaatttggggga

SEQ ID NO: 20080 - DNA, 19 bp, Artificial Sequence
  Target B2M Sequence complement
tgcttagaatttgggggaa

SEQ ID NO: 20081 - DNA, 19 bp, Artificial Sequence
  Target B2M Sequence complement
gcttagaatttgggggaaa

SEQ ID NO: 20082 - DNA, 19 bp, Artificial Sequence
  Target B2M Sequence complement
cttagaatttgggggaaaa

SEQ ID NO: 20083 - DNA, 19 bp, Artificial Sequence
  Target B2M Sequence complement
ttagaatttgggggaaaat

SEQ ID NO: 20084 - DNA, 19 bp, Artificial Sequence
  Target B2M Sequence complement
tagaatttgggggaaaatt

SEQ ID NO: 20085 - DNA, 19 bp, Artificial Sequence
  Target B2M Sequence complement
agaatttgggggaaaattt

SEQ ID NO: 20086 - DNA, 19 bp, Artificial Sequence
  Target B2M Sequence complement
gaatttgggggaaaattta

SEQ ID NO: 20087 - DNA, 19 bp, Artificial Sequence
  Target B2M Sequence complement
aatttgggggaaaatttag

SEQ ID NO: 20088 - DNA, 19 bp, Artificial Sequence
  Target B2M Sequence complement
atttgggggaaaatttaga

SEQ ID NO: 20089 - DNA, 19 bp, Artificial Sequence
  Target B2M Sequence complement
tttgggggaaaatttagaa

SEQ ID NO: 20090 - DNA, 19 bp, Artificial Sequence
  Target B2M Sequence complement
ttgggggaaaatttagaaa

SEQ ID NO: 20091 - DNA, 19 bp, Artificial Sequence
  Target B2M Sequence complement
tgggggaaaatttagaaat

SEQ ID NO: 20092 - DNA, 19 bp, Artificial Sequence
  Target B2M Sequence complement
gggggaaaatttagaaata

SEQ ID NO: 20093 - DNA, 19 bp, Artificial Sequence
  Target B2M Sequence complement
ggggaaaatttagaaatat

SEQ ID NO: 20094 - DNA, 19 bp, Artificial Sequence
  Target B2M Sequence complement
atgaatgaaacattttgtc

SEQ ID NO: 20095 - DNA, 19 bp, Artificial Sequence
  Target B2M Sequence complement
tgaatgaaacattttgtca

SEQ ID NO: 20096 - DNA, 19 bp, Artificial Sequence
  Target B2M Sequence complement
gaatgaaacattttgtcat

SEQ ID NO: 20097 - DNA, 19 bp, Artificial Sequence
  Target B2M Sequence complement
ggttaatctggtttatttt

SEQ ID NO: 20098 - DNA, 19 bp, Artificial Sequence
  Target B2M Sequence complement
atctggtttatttttgttc

SEQ ID NO: 20099 - DNA, 19 bp, Artificial Sequence
  Target B2M Sequence complement
tctggtttatttttgttcc

SEQ ID NO: 20100 - DNA, 19 bp, Artificial Sequence
  Target B2M Sequence complement
ctggtttatttttgttcca

SEQ ID NO: 20101 - DNA, 19 bp, Artificial Sequence
  Target B2M Sequence complement
tggtttatttttgttccac

SEQ ID NO: 20102 - DNA, 19 bp, Artificial Sequence
  Target B2M Sequence complement
ggtttatttttgttccaca

SEQ ID NO: 20103 - DNA, 19 bp, Artificial Sequence
  Target B2M Sequence complement
gtttatttttgttccacaa

SEQ ID NO: 20104 - DNA, 19 bp, Artificial Sequence
  Target B2M Sequence complement
tttatttttgttccacaag

SEQ ID NO: 20105 - DNA, 19 bp, Artificial Sequence
  Target B2M Sequence complement
ttatttttgttccacaagt

SEQ ID NO: 20106 - DNA, 19 bp, Artificial Sequence
  Target B2M Sequence complement
tatttttgttccacaagtt

SEQ ID NO: 20107 - DNA, 19 bp, Artificial Sequence
  Target B2M Sequence complement
atttttgttccacaagtta

SEQ ID NO: 20108 - DNA, 19 bp, Artificial Sequence
  Target B2M Sequence complement
tttttgttccacaagttaa

SEQ ID NO: 20109 - DNA, 19 bp, Artificial Sequence
  Target B2M Sequence complement
ttttgttccacaagttaaa

SEQ ID NO: 20110 - DNA, 20 bp, Artificial Sequence
  Target B2M Sequence complement
aatggagagagaattgaaaa

SEQ ID NO: 20111 - DNA, 20 bp, Artificial Sequence
  Target B2M Sequence complement
atggagagagaattgaaaaa

SEQ ID NO: 20112 - DNA, 20 bp, Artificial Sequence
  Target B2M Sequence complement
tggagagagaattgaaaaag

SEQ ID NO: 20113 - DNA, 20 bp, Artificial Sequence
  Target B2M Sequence complement
ggagagagaattgaaaaagt

SEQ ID NO: 20114 - DNA, 20 bp, Artificial Sequence
  Target B2M Sequence complement
gagagagaattgaaaaagtg

SEQ ID NO: 20115 - DNA, 20 bp, Artificial Sequence
  Target B2M Sequence complement
agagagaattgaaaaagtgg

SEQ ID NO: 20116 - DNA, 20 bp, Artificial Sequence
  Target B2M Sequence complement
gagagaattgaaaaagtgga

SEQ ID NO: 20117 - DNA, 20 bp, Artificial Sequence
  Target B2M Sequence complement
agagaattgaaaaagtggag

SEQ ID NO: 20118 - DNA, 20 bp, Artificial Sequence
  Target B2M Sequence complement
gagaattgaaaaagtggagc

SEQ ID NO: 20119 - DNA, 20 bp, Artificial Sequence
  Target B2M Sequence complement
agaattgaaaaagtggagca

SEQ ID NO: 20120 - DNA, 20 bp, Artificial Sequence
  Target B2M Sequence complement
gaattgaaaaagtggagcat

SEQ ID NO: 20121 - DNA, 20 bp, Artificial Sequence
  Target B2M Sequence complement
aattgaaaaagtggagcatt

SEQ ID NO: 20122 - DNA, 20 bp, Artificial Sequence
  Target B2M Sequence complement
attgaaaaagtggagcattc

SEQ ID NO: 20123 - DNA, 20 bp, Artificial Sequence
  Target B2M Sequence complement
ttgaaaaagtggagcattca

SEQ ID NO: 20124 - DNA, 20 bp, Artificial Sequence
  Target B2M Sequence complement
tgaaaaagtggagcattcag

SEQ ID NO: 20125 - DNA, 20 bp, Artificial Sequence
  Target B2M Sequence complement
gaaaaagtggagcattcaga

SEQ ID NO: 20126 - DNA, 20 bp, Artificial Sequence
  Target B2M Sequence complement
aaaaagtggagcattcagac

SEQ ID NO: 20127 - DNA, 20 bp, Artificial Sequence
  Target B2M Sequence complement
aaaagtggagcattcagact

SEQ ID NO: 20128 - DNA, 20 bp, Artificial Sequence
  Target B2M Sequence complement
tactacactgaattcacccc

SEQ ID NO: 20129 - DNA, 20 bp, Artificial Sequence
  Target B2M Sequence complement
actacactgaattcaccccc

SEQ ID NO: 20130 - DNA, 20 bp, Artificial Sequence
  Target B2M Sequence complement
ctacactgaattcaccccca

SEQ ID NO: 20131 - DNA, 20 bp, Artificial Sequence
  Target B2M Sequence complement
tacactgaattcacccccac

SEQ ID NO: 20132 - DNA, 20 bp, Artificial Sequence
  Target B2M Sequence complement
acactgaattcacccccact

SEQ ID NO: 20133 - DNA, 20 bp, Artificial Sequence
  Target B2M Sequence complement
cactgaattcacccccactg

SEQ ID NO: 20134 - DNA, 20 bp, Artificial Sequence
  Target B2M Sequence complement
actgaattcacccccactga

SEQ ID NO: 20135 - DNA, 20 bp, Artificial Sequence
  Target B2M Sequence complement
ctgaattcacccccactgaa

SEQ ID NO: 20136 - DNA, 20 bp, Artificial Sequence
  Target B2M Sequence complement
tgaattcacccccactgaaa

SEQ ID NO: 20137 - DNA, 20 bp, Artificial Sequence
  Target B2M Sequence complement
gaattcacccccactgaaaa

SEQ ID NO: 20138 - DNA, 20 bp, Artificial Sequence
  Target B2M Sequence complement
aattcacccccactgaaaaa

SEQ ID NO: 20139 - DNA, 20 bp, Artificial Sequence
  Target B2M Sequence complement
attcacccccactgaaaaag

SEQ ID NO: 20140 - DNA, 20 bp, Artificial Sequence
  Target B2M Sequence complement
ttcacccccactgaaaaaga

SEQ ID NO: 20141 - DNA, 20 bp, Artificial Sequence
  Target B2M Sequence complement
tcacccccactgaaaaagat

SEQ ID NO: 20142 - DNA, 20 bp, Artificial Sequence
  Target B2M Sequence complement
cacccccactgaaaaagatg

SEQ ID NO: 20143 - DNA, 20 bp, Artificial Sequence
  Target B2M Sequence complement
acccccactgaaaaagatga

SEQ ID NO: 20144 - DNA, 20 bp, Artificial Sequence
  Target B2M Sequence complement
cccccactgaaaaagatgag

SEQ ID NO: 20145 - DNA, 20 bp, Artificial Sequence
  Target B2M Sequence complement
ccccactgaaaaagatgagt

SEQ ID NO: 20146 - DNA, 20 bp, Artificial Sequence
  Target B2M Sequence complement
cccactgaaaaagatgagta

SEQ ID NO: 20147 - DNA, 20 bp, Artificial Sequence
  Target B2M Sequence complement
ccactgaaaaagatgagtat

SEQ ID NO: 20148 - DNA, 20 bp, Artificial Sequence
  Target B2M Sequence complement
cactgaaaaagatgagtatg

SEQ ID NO: 20149 - DNA, 20 bp, Artificial Sequence
  Target B2M Sequence complement
actgaaaaagatgagtatgc

SEQ ID NO: 20150 - DNA, 20 bp, Artificial Sequence
  Target B2M Sequence complement
ctgaaaaagatgagtatgcc

SEQ ID NO: 20151 - DNA, 20 bp, Artificial Sequence
  Target B2M Sequence complement
tgaaaaagatgagtatgcct

SEQ ID NO: 20152 - DNA, 20 bp, Artificial Sequence
  Target B2M Sequence complement
gaaaaagatgagtatgcctg

SEQ ID NO: 20153 - DNA, 20 bp, Artificial Sequence
  Target B2M Sequence complement
aaaaagatgagtatgcctgc

SEQ ID NO: 20154 - DNA, 20 bp, Artificial Sequence
  Target B2M Sequence complement
aaaagatgagtatgcctgcc

SEQ ID NO: 20155 - DNA, 20 bp, Artificial Sequence
  Target B2M Sequence complement
aattctgcttgcttgctttt

SEQ ID NO: 20156 - DNA, 20 bp, Artificial Sequence
  Target B2M Sequence complement
attctgcttgcttgcttttt

SEQ ID NO: 20157 - DNA, 20 bp, Artificial Sequence
  Target B2M Sequence complement
ttctgcttgcttgcttttta

SEQ ID NO: 20158 - DNA, 20 bp, Artificial Sequence
  Target B2M Sequence complement
tctgcttgcttgctttttaa

SEQ ID NO: 20159 - DNA, 20 bp, Artificial Sequence
  Target B2M Sequence complement
ctgcttgcttgctttttaat

SEQ ID NO: 20160 - DNA, 20 bp, Artificial Sequence
  Target B2M Sequence complement
tgcttgcttgctttttaata

SEQ ID NO: 20161 - DNA, 20 bp, Artificial Sequence
  Target B2M Sequence complement
gcttgcttgctttttaatat

SEQ ID NO: 20162 - DNA, 20 bp, Artificial Sequence
  Target B2M Sequence complement
cttgcttgctttttaatatt

SEQ ID NO: 20163 - DNA, 20 bp, Artificial Sequence
  Target B2M Sequence complement
ttgcttgctttttaatattg

SEQ ID NO: 20164 - DNA, 20 bp, Artificial Sequence
  Target B2M Sequence complement
tgcttgctttttaatattga

SEQ ID NO: 20165 - DNA, 20 bp, Artificial Sequence
  Target B2M Sequence complement
gcttgctttttaatattgat

SEQ ID NO: 20166 - DNA, 20 bp, Artificial Sequence
  Target B2M Sequence complement
gctttttaatattgatatgc

SEQ ID NO: 20167 - DNA, 20 bp, Artificial Sequence
  Target B2M Sequence complement
cttacactttatgcacaaaa

SEQ ID NO: 20168 - DNA, 20 bp, Artificial Sequence
  Target B2M Sequence complement
ttacactttatgcacaaaat

SEQ ID NO: 20169 - DNA, 20 bp, Artificial Sequence
  Target B2M Sequence complement
tacactttatgcacaaaatg

SEQ ID NO: 20170 - DNA, 20 bp, Artificial Sequence
  Target B2M Sequence complement
acactttatgcacaaaatgt

SEQ ID NO: 20171 - DNA, 20 bp, Artificial Sequence
  Target B2M Sequence complement
cactttatgcacaaaatgta

SEQ ID NO: 20172 - DNA, 20 bp, Artificial Sequence
  Target B2M Sequence complement
actttatgcacaaaatgtag

SEQ ID NO: 20173 - DNA, 20 bp, Artificial Sequence
  Target B2M Sequence complement
ctttatgcacaaaatgtagg

SEQ ID NO: 20174 - DNA, 20 bp, Artificial Sequence
  Target B2M Sequence complement
tttatgcacaaaatgtaggg

SEQ ID NO: 20175 - DNA, 20 bp, Artificial Sequence
  Target B2M Sequence complement
ttatgcacaaaatgtagggt

SEQ ID NO: 20176 - DNA, 20 bp, Artificial Sequence
  Target B2M Sequence complement
tatgcacaaaatgtagggtt

SEQ ID NO: 20177 - DNA, 20 bp, Artificial Sequence
  Target B2M Sequence complement
atgcacaaaatgtagggtta

SEQ ID NO: 20178 - DNA, 20 bp, Artificial Sequence
  Target B2M Sequence complement
tgcacaaaatgtagggttat

SEQ ID NO: 20179 - DNA, 20 bp, Artificial Sequence
  Target B2M Sequence complement
gcacaaaatgtagggttata

SEQ ID NO: 20180 - DNA, 20 bp, Artificial Sequence
  Target B2M Sequence complement
cacaaaatgtagggttataa

SEQ ID NO: 20181 - DNA, 20 bp, Artificial Sequence
  Target B2M Sequence complement
acaaaatgtagggttataat

SEQ ID NO: 20182 - DNA, 20 bp, Artificial Sequence
  Target B2M Sequence complement
caaaatgtagggttataata

SEQ ID NO: 20183 - DNA, 20 bp, Artificial Sequence
  Target B2M Sequence complement
tggcaacttagaggtgggga

SEQ ID NO: 20184 - DNA, 20 bp, Artificial Sequence
  Target B2M Sequence complement
caacttagaggtggggagca

SEQ ID NO: 20185 - DNA, 20 bp, Artificial Sequence
  Target B2M Sequence complement
aacttagaggtggggagcag

SEQ ID NO: 20186 - DNA, 20 bp, Artificial Sequence
  Target B2M Sequence complement
acttagaggtggggagcaga

SEQ ID NO: 20187 - DNA, 20 bp, Artificial Sequence
  Target B2M Sequence complement
ttagaggtggggagcagaga

SEQ ID NO: 20188 - DNA, 20 bp, Artificial Sequence
  Target B2M Sequence complement
tagaggtggggagcagagaa

SEQ ID NO: 20189 - DNA, 20 bp, Artificial Sequence
  Target B2M Sequence complement
agaggtggggagcagagaat

SEQ ID NO: 20190 - DNA, 20 bp, Artificial Sequence
  Target B2M Sequence complement
gaggtggggagcagagaatt

SEQ ID NO: 20191 - DNA, 20 bp, Artificial Sequence
  Target B2M Sequence complement
aggtggggagcagagaattc

SEQ ID NO: 20192 - DNA, 20 bp, Artificial Sequence
  Target B2M Sequence complement
ggtggggagcagagaattct

SEQ ID NO: 20193 - DNA, 20 bp, Artificial Sequence
  Target B2M Sequence complement
gtggggagcagagaattctc

SEQ ID NO: 20194 - DNA, 20 bp, Artificial Sequence
  Target B2M Sequence complement
tggggagcagagaattctct

SEQ ID NO: 20195 - DNA, 20 bp, Artificial Sequence
  Target B2M Sequence complement
ggggagcagagaattctctt

SEQ ID NO: 20196 - DNA, 20 bp, Artificial Sequence
  Target B2M Sequence complement
actctgcttagaatttgggg

SEQ ID NO: 20197 - DNA, 20 bp, Artificial Sequence
  Target B2M Sequence complement
ctctgcttagaatttggggg

SEQ ID NO: 20198 - DNA, 20 bp, Artificial Sequence
  Target B2M Sequence complement
tctgcttagaatttggggga

SEQ ID NO: 20199 - DNA, 20 bp, Artificial Sequence
  Target B2M Sequence complement
ctgcttagaatttgggggaa

SEQ ID NO: 20200 - DNA, 20 bp, Artificial Sequence
  Target B2M Sequence complement
tgcttagaatttgggggaaa

SEQ ID NO: 20201 - DNA, 20 bp, Artificial Sequence
  Target B2M Sequence complement
gcttagaatttgggggaaaa

SEQ ID NO: 20202 - DNA, 20 bp, Artificial Sequence
  Target B2M Sequence complement
cttagaatttgggggaaaat

SEQ ID NO: 20203 - DNA, 20 bp, Artificial Sequence
  Target B2M Sequence complement
ttagaatttgggggaaaatt

SEQ ID NO: 20204 - DNA, 20 bp, Artificial Sequence
  Target B2M Sequence complement
tagaatttgggggaaaattt

SEQ ID NO: 20205 - DNA, 20 bp, Artificial Sequence
  Target B2M Sequence complement
agaatttgggggaaaattta

SEQ ID NO: 20206 - DNA, 20 bp, Artificial Sequence
  Target B2M Sequence complement
gaatttgggggaaaatttag

SEQ ID NO: 20207 - DNA, 20 bp, Artificial Sequence
  Target B2M Sequence complement
aatttgggggaaaatttaga

SEQ ID NO: 20208 - DNA, 20 bp, Artificial Sequence
  Target B2M Sequence complement
atttgggggaaaatttagaa

SEQ ID NO: 20209 - DNA, 20 bp, Artificial Sequence
  Target B2M Sequence complement
tttgggggaaaatttagaaa

SEQ ID NO: 20210 - DNA, 20 bp, Artificial Sequence
  Target B2M Sequence complement
ttgggggaaaatttagaaat

SEQ ID NO: 20211 - DNA, 20 bp, Artificial Sequence
  Target B2M Sequence complement
tgggggaaaatttagaaata

SEQ ID NO: 20212 - DNA, 20 bp, Artificial Sequence
  Target B2M Sequence complement
gggggaaaatttagaaatat

SEQ ID NO: 20213 - DNA, 20 bp, Artificial Sequence
  Target B2M Sequence complement
ggggaaaatttagaaatata

SEQ ID NO: 20214 - DNA, 20 bp, Artificial Sequence
  Target B2M Sequence complement
aatgaatgaaacattttgtc

SEQ ID NO: 20215 - DNA, 20 bp, Artificial Sequence
  Target B2M Sequence complement
atgaatgaaacattttgtca

SEQ ID NO: 20216 - DNA, 20 bp, Artificial Sequence
  Target B2M Sequence complement
tgaatgaaacattttgtcat

SEQ ID NO: 20217 - DNA, 20 bp, Artificial Sequence
  Target B2M Sequence complement
gaatgaaacattttgtcata

SEQ ID NO: 20218 - DNA, 20 bp, Artificial Sequence
  Target B2M Sequence complement
gaaacattttgtcatataag

SEQ ID NO: 20219 - DNA, 20 bp, Artificial Sequence
  Target B2M Sequence complement
cattttgtcatataagattc

SEQ ID NO: 20220 - DNA, 20 bp, Artificial Sequence
  Target B2M Sequence complement
tggttaatctggtttatttt

SEQ ID NO: 20221 - DNA, 20 bp, Artificial Sequence
  Target B2M Sequence complement
ggttaatctggtttattttt

SEQ ID NO: 20222 - DNA, 20 bp, Artificial Sequence
  Target B2M Sequence complement
gttaatctggtttatttttg

SEQ ID NO: 20223 - DNA, 20 bp, Artificial Sequence
  Target B2M Sequence complement
aatctggtttatttttgttc

SEQ ID NO: 20224 - DNA, 20 bp, Artificial Sequence
  Target B2M Sequence complement
atctggtttatttttgttcc

SEQ ID NO: 20225 - DNA, 20 bp, Artificial Sequence
  Target B2M Sequence complement
tctggtttatttttgttcca

SEQ ID NO: 20226 - DNA, 20 bp, Artificial Sequence
  Target B2M Sequence complement
ctggtttatttttgttccac

SEQ ID NO: 20227 - DNA, 20 bp, Artificial Sequence
  Target B2M Sequence complement
tggtttatttttgttccaca

SEQ ID NO: 20228 - DNA, 20 bp, Artificial Sequence
  Target B2M Sequence complement
ggtttatttttgttccacaa

SEQ ID NO: 20229 - DNA, 20 bp, Artificial Sequence
  Target B2M Sequence complement
gtttatttttgttccacaag

SEQ ID NO: 20230 - DNA, 20 bp, Artificial Sequence
  Target B2M Sequence complement
tttatttttgttccacaagt

SEQ ID NO: 20231 - DNA, 20 bp, Artificial Sequence
  Target B2M Sequence complement
ttatttttgttccacaagtt

SEQ ID NO: 20232 - DNA, 20 bp, Artificial Sequence
  Target B2M Sequence complement
tatttttgttccacaagtta

SEQ ID NO: 20233 - DNA, 20 bp, Artificial Sequence
  Target B2M Sequence complement
atttttgttccacaagttaa

SEQ ID NO: 20234 - DNA, 20 bp, Artificial Sequence
  Target B2M Sequence complement
tttttgttccacaagttaaa

SEQ ID NO: 20235 - DNA, 20 bp, Artificial Sequence
  Target B2M Sequence complement
ttttgttccacaagttaaat

SEQ ID NO: 20236 - DNA, 21 bp, Artificial Sequence
  Target B2M Sequence complement
tgacagcattcgggccgagat

SEQ ID NO: 20237 - DNA, 21 bp, Artificial Sequence
  Target B2M Sequence complement
acagcattcgggccgagatgt

SEQ ID NO: 20238 - DNA, 21 bp, Artificial Sequence
  Target B2M Sequence complement
agcattcgggccgagatgtct

SEQ ID NO: 20239 - DNA, 21 bp, Artificial Sequence
  Target B2M Sequence complement
gaatggagagagaattgaaaa

SEQ ID NO: 20240 - DNA, 21 bp, Artificial Sequence
  Target B2M Sequence complement
aatggagagagaattgaaaaa

SEQ ID NO: 20241 - DNA, 21 bp, Artificial Sequence
  Target B2M Sequence complement
atggagagagaattgaaaaag

SEQ ID NO: 20242 - DNA, 21 bp, Artificial Sequence
  Target B2M Sequence complement
tggagagagaattgaaaaagt

SEQ ID NO: 20243 - DNA, 21 bp, Artificial Sequence
  Target B2M Sequence complement
ggagagagaattgaaaaagtg

SEQ ID NO: 20244 - DNA, 21 bp, Artificial Sequence
  Target B2M Sequence complement
gagagagaattgaaaaagtgg

SEQ ID NO: 20245 - DNA, 21 bp, Artificial Sequence
  Target B2M Sequence complement
agagagaattgaaaaagtgga

SEQ ID NO: 20246 - DNA, 21 bp, Artificial Sequence
  Target B2M Sequence complement
gagagaattgaaaaagtggag

SEQ ID NO: 20247 - DNA, 21 bp, Artificial Sequence
  Target B2M Sequence complement
agagaattgaaaaagtggagc

SEQ ID NO: 20248 - DNA, 21 bp, Artificial Sequence
  Target B2M Sequence complement
gagaattgaaaaagtggagca

SEQ ID NO: 20249 - DNA, 21 bp, Artificial Sequence
  Target B2M Sequence complement
agaattgaaaaagtggagcat

SEQ ID NO: 20250 - DNA, 21 bp, Artificial Sequence
  Target B2M Sequence complement
gaattgaaaaagtggagcatt

SEQ ID NO: 20251 - DNA, 21 bp, Artificial Sequence
  Target B2M Sequence complement
aattgaaaaagtggagcattc

SEQ ID NO: 20252 - DNA, 21 bp, Artificial Sequence
  Target B2M Sequence complement
attgaaaaagtggagcattca

SEQ ID NO: 20253 - DNA, 21 bp, Artificial Sequence
  Target B2M Sequence complement
ttgaaaaagtggagcattcag

SEQ ID NO: 20254 - DNA, 21 bp, Artificial Sequence
  Target B2M Sequence complement
tgaaaaagtggagcattcaga

SEQ ID NO: 20255 - DNA, 21 bp, Artificial Sequence
  Target B2M Sequence complement
gaaaaagtggagcattcagac

SEQ ID NO: 20256 - DNA, 21 bp, Artificial Sequence
  Target B2M Sequence complement
aaaaagtggagcattcagact

SEQ ID NO: 20257 - DNA, 21 bp, Artificial Sequence
  Target B2M Sequence complement
aaaagtggagcattcagactt

SEQ ID NO: 20258 - DNA, 21 bp, Artificial Sequence
  Target B2M Sequence complement
gtactacactgaattcacccc

SEQ ID NO: 20259 - DNA, 21 bp, Artificial Sequence
  Target B2M Sequence complement
tactacactgaattcaccccc

SEQ ID NO: 20260 - DNA, 21 bp, Artificial Sequence
  Target B2M Sequence complement
actacactgaattcaccccca

SEQ ID NO: 20261 - DNA, 21 bp, Artificial Sequence
  Target B2M Sequence complement
ctacactgaattcacccccac

SEQ ID NO: 20262 - DNA, 21 bp, Artificial Sequence
  Target B2M Sequence complement
tacactgaattcacccccact

SEQ ID NO: 20263 - DNA, 21 bp, Artificial Sequence
  Target B2M Sequence complement
acactgaattcacccccactg

SEQ ID NO: 20264 - DNA, 21 bp, Artificial Sequence
  Target B2M Sequence complement
cactgaattcacccccactga

SEQ ID NO: 20265 - DNA, 21 bp, Artificial Sequence
  Target B2M Sequence complement
actgaattcacccccactgaa

SEQ ID NO: 20266 - DNA, 21 bp, Artificial Sequence
  Target B2M Sequence complement
ctgaattcacccccactgaaa

SEQ ID NO: 20267 - DNA, 21 bp, Artificial Sequence
  Target B2M Sequence complement
tgaattcacccccactgaaaa

SEQ ID NO: 20268 - DNA, 21 bp, Artificial Sequence
  Target B2M Sequence complement
gaattcacccccactgaaaaa

SEQ ID NO: 20269 - DNA, 21 bp, Artificial Sequence
  Target B2M Sequence complement
aattcacccccactgaaaaag

SEQ ID NO: 20270 - DNA, 21 bp, Artificial Sequence
  Target B2M Sequence complement
attcacccccactgaaaaaga

SEQ ID NO: 20271 - DNA, 21 bp, Artificial Sequence
  Target B2M Sequence complement
ttcacccccactgaaaaagat

SEQ ID NO: 20272 - DNA, 21 bp, Artificial Sequence
  Target B2M Sequence complement
tcacccccactgaaaaagatg

SEQ ID NO: 20273 - DNA, 21 bp, Artificial Sequence
  Target B2M Sequence complement
cacccccactgaaaaagatga

SEQ ID NO: 20274 - DNA, 21 bp, Artificial Sequence
  Target B2M Sequence complement
acccccactgaaaaagatgag

SEQ ID NO: 20275 - DNA, 21 bp, Artificial Sequence
  Target B2M Sequence complement
cccccactgaaaaagatgagt

SEQ ID NO: 20276 - DNA, 21 bp, Artificial Sequence
  Target B2M Sequence complement
ccccactgaaaaagatgagta

SEQ ID NO: 20277 - DNA, 21 bp, Artificial Sequence
  Target B2M Sequence complement
cccactgaaaaagatgagtat

SEQ ID NO: 20278 - DNA, 21 bp, Artificial Sequence
  Target B2M Sequence complement
ccactgaaaaagatgagtatg

SEQ ID NO: 20279 - DNA, 21 bp, Artificial Sequence
  Target B2M Sequence complement
cactgaaaaagatgagtatgc

SEQ ID NO: 20280 - DNA, 21 bp, Artificial Sequence
  Target B2M Sequence complement
actgaaaaagatgagtatgcc

SEQ ID NO: 20281 - DNA, 21 bp, Artificial Sequence
  Target B2M Sequence complement
ctgaaaaagatgagtatgcct

SEQ ID NO: 20282 - DNA, 21 bp, Artificial Sequence
  Target B2M Sequence complement
tgaaaaagatgagtatgcctg

SEQ ID NO: 20283 - DNA, 21 bp, Artificial Sequence
  Target B2M Sequence complement
gaaaaagatgagtatgcctgc

SEQ ID NO: 20284 - DNA, 21 bp, Artificial Sequence
  Target B2M Sequence complement
aaaaagatgagtatgcctgcc

SEQ ID NO: 20285 - DNA, 21 bp, Artificial Sequence
  Target B2M Sequence complement
aaaagatgagtatgcctgccg

SEQ ID NO: 20286 - DNA, 21 bp, Artificial Sequence
  Target B2M Sequence complement
aaattctgcttgcttgctttt

SEQ ID NO: 20287 - DNA, 21 bp, Artificial Sequence
  Target B2M Sequence complement
aattctgcttgcttgcttttt

SEQ ID NO: 20288 - DNA, 21 bp, Artificial Sequence
  Target B2M Sequence complement
attctgcttgcttgcttttta

SEQ ID NO: 20289 - DNA, 21 bp, Artificial Sequence
  Target B2M Sequence complement
ttctgcttgcttgctttttaa

SEQ ID NO: 20290 - DNA, 21 bp, Artificial Sequence
  Target B2M Sequence complement
tctgcttgcttgctttttaat

SEQ ID NO: 20291 - DNA, 21 bp, Artificial Sequence
  Target B2M Sequence complement
ctgcttgcttgctttttaata

SEQ ID NO: 20292 - DNA, 21 bp, Artificial Sequence
  Target B2M Sequence complement
tgcttgcttgctttttaatat

SEQ ID NO: 20293 - DNA, 21 bp, Artificial Sequence
  Target B2M Sequence complement
gcttgcttgctttttaatatt

SEQ ID NO: 20294 - DNA, 21 bp, Artificial Sequence
  Target B2M Sequence complement
cttgcttgctttttaatattg

SEQ ID NO: 20295 - DNA, 21 bp, Artificial Sequence
  Target B2M Sequence complement
acttacactttatgcacaaaa

SEQ ID NO: 20296 - DNA, 21 bp, Artificial Sequence
  Target B2M Sequence complement
cttacactttatgcacaaaat

SEQ ID NO: 20297 - DNA, 21 bp, Artificial Sequence
  Target B2M Sequence complement
ttacactttatgcacaaaatg

SEQ ID NO: 20298 - DNA, 21 bp, Artificial Sequence
  Target B2M Sequence complement
tacactttatgcacaaaatgt

SEQ ID NO: 20299 - DNA, 21 bp, Artificial Sequence
  Target B2M Sequence complement
acactttatgcacaaaatgta

SEQ ID NO: 20300 - DNA, 21 bp, Artificial Sequence
  Target B2M Sequence complement
cactttatgcacaaaatgtag

SEQ ID NO: 20301 - DNA, 21 bp, Artificial Sequence
  Target B2M Sequence complement
actttatgcacaaaatgtagg

SEQ ID NO: 20302 - DNA, 21 bp, Artificial Sequence
  Target B2M Sequence complement
ctttatgcacaaaatgtaggg

SEQ ID NO: 20303 - DNA, 21 bp, Artificial Sequence
  Target B2M Sequence complement
tttatgcacaaaatgtagggt

SEQ ID NO: 20304 - DNA, 21 bp, Artificial Sequence
  Target B2M Sequence complement
ttatgcacaaaatgtagggtt

SEQ ID NO: 20305 - DNA, 21 bp, Artificial Sequence
  Target B2M Sequence complement
tatgcacaaaatgtagggtta

SEQ ID NO: 20306 - DNA, 21 bp, Artificial Sequence
  Target B2M Sequence complement
atgcacaaaatgtagggttat

SEQ ID NO: 20307 - DNA, 21 bp, Artificial Sequence
  Target B2M Sequence complement
tgcacaaaatgtagggttata

SEQ ID NO: 20308 - DNA, 21 bp, Artificial Sequence
  Target B2M Sequence complement
gcacaaaatgtagggttataa

SEQ ID NO: 20309 - DNA, 21 bp, Artificial Sequence
  Target B2M Sequence complement
cacaaaatgtagggttataat

SEQ ID NO: 20310 - DNA, 21 bp, Artificial Sequence
  Target B2M Sequence complement
ctggcaacttagaggtgggga

SEQ ID NO: 20311 - DNA, 21 bp, Artificial Sequence
  Target B2M Sequence complement
tggcaacttagaggtggggag

SEQ ID NO: 20312 - DNA, 21 bp, Artificial Sequence
  Target B2M Sequence complement
gcaacttagaggtggggagca

SEQ ID NO: 20313 - DNA, 21 bp, Artificial Sequence
  Target B2M Sequence complement
caacttagaggtggggagcag

SEQ ID NO: 20314 - DNA, 21 bp, Artificial Sequence
  Target B2M Sequence complement
aacttagaggtggggagcaga

SEQ ID NO: 20315 - DNA, 21 bp, Artificial Sequence
  Target B2M Sequence complement
acttagaggtggggagcagag

SEQ ID NO: 20316 - DNA, 21 bp, Artificial Sequence
  Target B2M Sequence complement
cttagaggtggggagcagaga

SEQ ID NO: 20317 - DNA, 21 bp, Artificial Sequence
  Target B2M Sequence complement
ttagaggtggggagcagagaa

SEQ ID NO: 20318 - DNA, 21 bp, Artificial Sequence
  Target B2M Sequence complement
tagaggtggggagcagagaat

SEQ ID NO: 20319 - DNA, 21 bp, Artificial Sequence
  Target B2M Sequence complement
agaggtggggagcagagaatt

SEQ ID NO: 20320 - DNA, 21 bp, Artificial Sequence
  Target B2M Sequence complement
gaggtggggagcagagaattc

SEQ ID NO: 20321 - DNA, 21 bp, Artificial Sequence
  Target B2M Sequence complement
aggtggggagcagagaattct

SEQ ID NO: 20322 - DNA, 21 bp, Artificial Sequence
  Target B2M Sequence complement
ggtggggagcagagaattctc

SEQ ID NO: 20323 - DNA, 21 bp, Artificial Sequence
  Target B2M Sequence complement
gtggggagcagagaattctct

SEQ ID NO: 20324 - DNA, 21 bp, Artificial Sequence
  Target B2M Sequence complement
tggggagcagagaattctctt

SEQ ID NO: 20325 - DNA, 21 bp, Artificial Sequence
  Target B2M Sequence complement
ggggagcagagaattctctta

SEQ ID NO: 20326 - DNA, 21 bp, Artificial Sequence
  Target B2M Sequence complement
tactctgcttagaatttgggg

SEQ ID NO: 20327 - DNA, 21 bp, Artificial Sequence
  Target B2M Sequence complement
actctgcttagaatttggggg

SEQ ID NO: 20328 - DNA, 21 bp, Artificial Sequence
  Target B2M Sequence complement
ctctgcttagaatttggggga

SEQ ID NO: 20329 - DNA, 21 bp, Artificial Sequence
  Target B2M Sequence complement
tctgcttagaatttgggggaa

SEQ ID NO: 20330 - DNA, 21 bp, Artificial Sequence
  Target B2M Sequence complement
ctgcttagaatttgggggaaa

SEQ ID NO: 20331 - DNA, 21 bp, Artificial Sequence
  Target B2M Sequence complement
tgcttagaatttgggggaaaa

SEQ ID NO: 20332 - DNA, 21 bp, Artificial Sequence
  Target B2M Sequence complement
gcttagaatttgggggaaaat

SEQ ID NO: 20333 - DNA, 21 bp, Artificial Sequence
  Target B2M Sequence complement
cttagaatttgggggaaaatt

SEQ ID NO: 20334 - DNA, 21 bp, Artificial Sequence
  Target B2M Sequence complement
ttagaatttgggggaaaattt

SEQ ID NO: 20335 - DNA, 21 bp, Artificial Sequence
  Target B2M Sequence complement
tagaatttgggggaaaattta

SEQ ID NO: 20336 - DNA, 21 bp, Artificial Sequence
  Target B2M Sequence complement
agaatttgggggaaaatttag

SEQ ID NO: 20337 - DNA, 21 bp, Artificial Sequence
  Target B2M Sequence complement
gaatttgggggaaaatttaga

SEQ ID NO: 20338 - DNA, 21 bp, Artificial Sequence
  Target B2M Sequence complement
aatttgggggaaaatttagaa

SEQ ID NO: 20339 - DNA, 21 bp, Artificial Sequence
  Target B2M Sequence complement
atttgggggaaaatttagaaa

SEQ ID NO: 20340 - DNA, 21 bp, Artificial Sequence
  Target B2M Sequence complement
tttgggggaaaatttagaaat

SEQ ID NO: 20341 - DNA, 21 bp, Artificial Sequence
  Target B2M Sequence complement
ttgggggaaaatttagaaata

SEQ ID NO: 20342 - DNA, 21 bp, Artificial Sequence
  Target B2M Sequence complement
tgggggaaaatttagaaatat

SEQ ID NO: 20343 - DNA, 21 bp, Artificial Sequence
  Target B2M Sequence complement
gggggaaaatttagaaatata

SEQ ID NO: 20344 - DNA, 21 bp, Artificial Sequence
  Target B2M Sequence complement
gtggttaatctggtttatttt

SEQ ID NO: 20345 - DNA, 21 bp, Artificial Sequence
  Target B2M Sequence complement
ggttaatctggtttatttttg

SEQ ID NO: 20346 - DNA, 21 bp, Artificial Sequence
  Target B2M Sequence complement
aatctggtttatttttgttcc

SEQ ID NO: 20347 - DNA, 21 bp, Artificial Sequence
  Target B2M Sequence complement
atctggtttatttttgttcca

SEQ ID NO: 20348 - DNA, 21 bp, Artificial Sequence
  Target B2M Sequence complement
tctggtttatttttgttccac

SEQ ID NO: 20349 - DNA, 21 bp, Artificial Sequence
  Target B2M Sequence complement
ctggtttatttttgttccaca

SEQ ID NO: 20350 - DNA, 21 bp, Artificial Sequence
  Target B2M Sequence complement
tggtttatttttgttccacaa

SEQ ID NO: 20351 - DNA, 21 bp, Artificial Sequence
  Target B2M Sequence complement
ggtttatttttgttccacaag

SEQ ID NO: 20352 - DNA, 21 bp, Artificial Sequence
  Target B2M Sequence complement
gtttatttttgttccacaagt

SEQ ID NO: 20353 - DNA, 22 bp, Artificial Sequence
  Target B2M Sequence complement
aagctgacagcattcgggccga

SEQ ID NO: 20354 - DNA, 22 bp, Artificial Sequence
  Target B2M Sequence complement
ctgacagcattcgggccgagat

SEQ ID NO: 20355 - DNA, 22 bp, Artificial Sequence
  Target B2M Sequence complement
tgacagcattcgggccgagatg

SEQ ID NO: 20356 - DNA, 22 bp, Artificial Sequence
  Target B2M Sequence complement
gacagcattcgggccgagatgt

SEQ ID NO: 20357 - DNA, 22 bp, Artificial Sequence
  Target B2M Sequence complement
acagcattcgggccgagatgtc

SEQ ID NO: 20358 - DNA, 22 bp, Artificial Sequence
  Target B2M Sequence complement
cagcattcgggccgagatgtct

SEQ ID NO: 20359 - DNA, 22 bp, Artificial Sequence
  Target B2M Sequence complement
agcattcgggccgagatgtctc

SEQ ID NO: 20360 - DNA, 22 bp, Artificial Sequence
  Target B2M Sequence complement
attcgggccgagatgtctcgct

SEQ ID NO: 20361 - DNA, 22 bp, Artificial Sequence
  Target B2M Sequence complement
agaatggagagagaattgaaaa

SEQ ID NO: 20362 - DNA, 22 bp, Artificial Sequence
  Target B2M Sequence complement
gaatggagagagaattgaaaaa

SEQ ID NO: 20363 - DNA, 22 bp, Artificial Sequence
  Target B2M Sequence complement
aatggagagagaattgaaaaag

SEQ ID NO: 20364 - DNA, 22 bp, Artificial Sequence
  Target B2M Sequence complement
atggagagagaattgaaaaagt

SEQ ID NO: 20365 - DNA, 22 bp, Artificial Sequence
  Target B2M Sequence complement
tggagagagaattgaaaaagtg

SEQ ID NO: 20366 - DNA, 22 bp, Artificial Sequence
  Target B2M Sequence complement
ggagagagaattgaaaaagtgg

SEQ ID NO: 20367 - DNA, 22 bp, Artificial Sequence
  Target B2M Sequence complement
gagagagaattgaaaaagtgga

SEQ ID NO: 20368 - DNA, 22 bp, Artificial Sequence
  Target B2M Sequence complement
agagagaattgaaaaagtggag

SEQ ID NO: 20369 - DNA, 22 bp, Artificial Sequence
  Target B2M Sequence complement
gagagaattgaaaaagtggagc

SEQ ID NO: 20370 - DNA, 22 bp, Artificial Sequence
  Target B2M Sequence complement
agagaattgaaaaagtggagca

SEQ ID NO: 20371 - DNA, 22 bp, Artificial Sequence
  Target B2M Sequence complement
gagaattgaaaaagtggagcat

SEQ ID NO: 20372 - DNA, 22 bp, Artificial Sequence
  Target B2M Sequence complement
agaattgaaaaagtggagcatt

SEQ ID NO: 20373 - DNA, 22 bp, Artificial Sequence
  Target B2M Sequence complement
gaattgaaaaagtggagcattc

SEQ ID NO: 20374 - DNA, 22 bp, Artificial Sequence
  Target B2M Sequence complement
aattgaaaaagtggagcattca

SEQ ID NO: 20375 - DNA, 22 bp, Artificial Sequence
  Target B2M Sequence complement
attgaaaaagtggagcattcag

SEQ ID NO: 20376 - DNA, 22 bp, Artificial Sequence
  Target B2M Sequence complement
ttgaaaaagtggagcattcaga

SEQ ID NO: 20377 - DNA, 22 bp, Artificial Sequence
  Target B2M Sequence complement
tgaaaaagtggagcattcagac

SEQ ID NO: 20378 - DNA, 22 bp, Artificial Sequence
  Target B2M Sequence complement
gaaaaagtggagcattcagact

SEQ ID NO: 20379 - DNA, 22 bp, Artificial Sequence
  Target B2M Sequence complement
aaaaagtggagcattcagactt

SEQ ID NO: 20380 - DNA, 22 bp, Artificial Sequence
  Target B2M Sequence complement
aaaagtggagcattcagacttg

SEQ ID NO: 20381 - DNA, 22 bp, Artificial Sequence
  Target B2M Sequence complement
tgtactacactgaattcacccc

SEQ ID NO: 20382 - DNA, 22 bp, Artificial Sequence
  Target B2M Sequence complement
gtactacactgaattcaccccc

SEQ ID NO: 20383 - DNA, 22 bp, Artificial Sequence
  Target B2M Sequence complement
tactacactgaattcaccccca

SEQ ID NO: 20384 - DNA, 22 bp, Artificial Sequence
  Target B2M Sequence complement
actacactgaattcacccccac

SEQ ID NO: 20385 - DNA, 22 bp, Artificial Sequence
  Target B2M Sequence complement
ctacactgaattcacccccact

SEQ ID NO: 20386 - DNA, 22 bp, Artificial Sequence
  Target B2M Sequence complement
tacactgaattcacccccactg

SEQ ID NO: 20387 - DNA, 22 bp, Artificial Sequence
  Target B2M Sequence complement
acactgaattcacccccactga

SEQ ID NO: 20388 - DNA, 22 bp, Artificial Sequence
  Target B2M Sequence complement
cactgaattcacccccactgaa

SEQ ID NO: 20389 - DNA, 22 bp, Artificial Sequence
  Target B2M Sequence complement
actgaattcacccccactgaaa

SEQ ID NO: 20390 - DNA, 22 bp, Artificial Sequence
  Target B2M Sequence complement
ctgaattcacccccactgaaaa

SEQ ID NO: 20391 - DNA, 22 bp, Artificial Sequence
  Target B2M Sequence complement
tgaattcacccccactgaaaaa

SEQ ID NO: 20392 - DNA, 22 bp, Artificial Sequence
  Target B2M Sequence complement
gaattcacccccactgaaaaag

SEQ ID NO: 20393 - DNA, 22 bp, Artificial Sequence
  Target B2M Sequence complement
aattcacccccactgaaaaaga

SEQ ID NO: 20394 - DNA, 22 bp, Artificial Sequence
  Target B2M Sequence complement
attcacccccactgaaaaagat

SEQ ID NO: 20395 - DNA, 22 bp, Artificial Sequence
  Target B2M Sequence complement
ttcacccccactgaaaaagatg

SEQ ID NO: 20396 - DNA, 22 bp, Artificial Sequence
  Target B2M Sequence complement
tcacccccactgaaaaagatga

SEQ ID NO: 20397 - DNA, 22 bp, Artificial Sequence
  Target B2M Sequence complement
cacccccactgaaaaagatgag

SEQ ID NO: 20398 - DNA, 22 bp, Artificial Sequence
  Target B2M Sequence complement
acccccactgaaaaagatgagt

SEQ ID NO: 20399 - DNA, 22 bp, Artificial Sequence
  Target B2M Sequence complement
cccccactgaaaaagatgagta

SEQ ID NO: 20400 - DNA, 22 bp, Artificial Sequence
  Target B2M Sequence complement
ccccactgaaaaagatgagtat

SEQ ID NO: 20401 - DNA, 22 bp, Artificial Sequence
  Target B2M Sequence complement
cccactgaaaaagatgagtatg

SEQ ID NO: 20402 - DNA, 22 bp, Artificial Sequence
  Target B2M Sequence complement
ccactgaaaaagatgagtatgc

SEQ ID NO: 20403 - DNA, 22 bp, Artificial Sequence
  Target B2M Sequence complement
cactgaaaaagatgagtatgcc

SEQ ID NO: 20404 - DNA, 22 bp, Artificial Sequence
  Target B2M Sequence complement
actgaaaaagatgagtatgcct

SEQ ID NO: 20405 - DNA, 22 bp, Artificial Sequence
  Target B2M Sequence complement
ctgaaaaagatgagtatgcctg

SEQ ID NO: 20406 - DNA, 22 bp, Artificial Sequence
  Target B2M Sequence complement
tgaaaaagatgagtatgcctgc

SEQ ID NO: 20407 - DNA, 22 bp, Artificial Sequence
  Target B2M Sequence complement
gaaaaagatgagtatgcctgcc

SEQ ID NO: 20408 - DNA, 22 bp, Artificial Sequence
  Target B2M Sequence complement
aaaaagatgagtatgcctgccg

SEQ ID NO: 20409 - DNA, 22 bp, Artificial Sequence
  Target B2M Sequence complement
aaaagatgagtatgcctgccgt

SEQ ID NO: 20410 - DNA, 22 bp, Artificial Sequence
  Target B2M Sequence complement
caaattctgcttgcttgctttt

SEQ ID NO: 20411 - DNA, 22 bp, Artificial Sequence
  Target B2M Sequence complement
aaattctgcttgcttgcttttt

SEQ ID NO: 20412 - DNA, 22 bp, Artificial Sequence
  Target B2M Sequence complement
aattctgcttgcttgcttttta

SEQ ID NO: 20413 - DNA, 22 bp, Artificial Sequence
  Target B2M Sequence complement
attctgcttgcttgctttttaa

SEQ ID NO: 20414 - DNA, 22 bp, Artificial Sequence
  Target B2M Sequence complement
ttctgcttgcttgctttttaat

SEQ ID NO: 20415 - DNA, 22 bp, Artificial Sequence
  Target B2M Sequence complement
tctgcttgcttgctttttaata

SEQ ID NO: 20416 - DNA, 22 bp, Artificial Sequence
  Target B2M Sequence complement
ctgcttgcttgctttttaatat

SEQ ID NO: 20417 - DNA, 22 bp, Artificial Sequence
  Target B2M Sequence complement
tgcttgcttgctttttaatatt

SEQ ID NO: 20418 - DNA, 22 bp, Artificial Sequence
  Target B2M Sequence complement
gcttgcttgctttttaatattg

SEQ ID NO: 20419 - DNA, 22 bp, Artificial Sequence
  Target B2M Sequence complement
cttgcttgctttttaatattga

SEQ ID NO: 20420 - DNA, 22 bp, Artificial Sequence
  Target B2M Sequence complement
cacttacactttatgcacaaaa

SEQ ID NO: 20421 - DNA, 22 bp, Artificial Sequence
  Target B2M Sequence complement
acttacactttatgcacaaaat

SEQ ID NO: 20422 - DNA, 22 bp, Artificial Sequence
  Target B2M Sequence complement
cttacactttatgcacaaaatg

SEQ ID NO: 20423 - DNA, 22 bp, Artificial Sequence
  Target B2M Sequence complement
ttacactttatgcacaaaatgt

SEQ ID NO: 20424 - DNA, 22 bp, Artificial Sequence
  Target B2M Sequence complement
tacactttatgcacaaaatgta

SEQ ID NO: 20425 - DNA, 22 bp, Artificial Sequence
  Target B2M Sequence complement
acactttatgcacaaaatgtag

SEQ ID NO: 20426 - DNA, 22 bp, Artificial Sequence
  Target B2M Sequence complement
cactttatgcacaaaatgtagg

SEQ ID NO: 20427 - DNA, 22 bp, Artificial Sequence
  Target B2M Sequence complement
actttatgcacaaaatgtaggg

SEQ ID NO: 20428 - DNA, 22 bp, Artificial Sequence
  Target B2M Sequence complement
ctttatgcacaaaatgtagggt

SEQ ID NO: 20429 - DNA, 22 bp, Artificial Sequence
  Target B2M Sequence complement
tttatgcacaaaatgtagggtt

SEQ ID NO: 20430 - DNA, 22 bp, Artificial Sequence
  Target B2M Sequence complement
ttatgcacaaaatgtagggtta

SEQ ID NO: 20431 - DNA, 22 bp, Artificial Sequence
  Target B2M Sequence complement
tatgcacaaaatgtagggttat

SEQ ID NO: 20432 - DNA, 22 bp, Artificial Sequence
  Target B2M Sequence complement
atgcacaaaatgtagggttata

SEQ ID NO: 20433 - DNA, 22 bp, Artificial Sequence
  Target B2M Sequence complement
tgcacaaaatgtagggttataa

SEQ ID NO: 20434 - DNA, 22 bp, Artificial Sequence
  Target B2M Sequence complement
gcacaaaatgtagggttataat

SEQ ID NO: 20435 - DNA, 22 bp, Artificial Sequence
  Target B2M Sequence complement
cacaaaatgtagggttataata

SEQ ID NO: 20436 - DNA, 22 bp, Artificial Sequence
  Target B2M Sequence complement
gctggcaacttagaggtgggga

SEQ ID NO: 20437 - DNA, 22 bp, Artificial Sequence
  Target B2M Sequence complement
ctggcaacttagaggtggggag

SEQ ID NO: 20438 - DNA, 22 bp, Artificial Sequence
  Target B2M Sequence complement
tggcaacttagaggtggggagc

SEQ ID NO: 20439 - DNA, 22 bp, Artificial Sequence
  Target B2M Sequence complement
ggcaacttagaggtggggagca

SEQ ID NO: 20440 - DNA, 22 bp, Artificial Sequence
  Target B2M Sequence complement
gcaacttagaggtggggagcag

SEQ ID NO: 20441 - DNA, 22 bp, Artificial Sequence
  Target B2M Sequence complement
caacttagaggtggggagcaga

SEQ ID NO: 20442 - DNA, 22 bp, Artificial Sequence
  Target B2M Sequence complement
aacttagaggtggggagcagag

SEQ ID NO: 20443 - DNA, 22 bp, Artificial Sequence
  Target B2M Sequence complement
acttagaggtggggagcagaga

SEQ ID NO: 20444 - DNA, 22 bp, Artificial Sequence
  Target B2M Sequence complement
cttagaggtggggagcagagaa

SEQ ID NO: 20445 - DNA, 22 bp, Artificial Sequence
  Target B2M Sequence complement
ttagaggtggggagcagagaat

SEQ ID NO: 20446 - DNA, 22 bp, Artificial Sequence
  Target B2M Sequence complement
tagaggtggggagcagagaatt

SEQ ID NO: 20447 - DNA, 22 bp, Artificial Sequence
  Target B2M Sequence complement
agaggtggggagcagagaattc

SEQ ID NO: 20448 - DNA, 22 bp, Artificial Sequence
  Target B2M Sequence complement
gaggtggggagcagagaattct

SEQ ID NO: 20449 - DNA, 22 bp, Artificial Sequence
  Target B2M Sequence complement
aggtggggagcagagaattctc

SEQ ID NO: 20450 - DNA, 22 bp, Artificial Sequence
  Target B2M Sequence complement
ggtggggagcagagaattctct

SEQ ID NO: 20451 - DNA, 22 bp, Artificial Sequence
  Target B2M Sequence complement
gtggggagcagagaattctctt

SEQ ID NO: 20452 - DNA, 22 bp, Artificial Sequence
  Target B2M Sequence complement
tggggagcagagaattctctta

SEQ ID NO: 20453 - DNA, 22 bp, Artificial Sequence
  Target B2M Sequence complement
ggggagcagagaattctcttat

SEQ ID NO: 20454 - DNA, 22 bp, Artificial Sequence
  Target B2M Sequence complement
atactctgcttagaatttgggg

SEQ ID NO: 20455 - DNA, 22 bp, Artificial Sequence
  Target B2M Sequence complement
tactctgcttagaatttggggg

SEQ ID NO: 20456 - DNA, 22 bp, Artificial Sequence
  Target B2M Sequence complement
actctgcttagaatttggggga

SEQ ID NO: 20457 - DNA, 22 bp, Artificial Sequence
  Target B2M Sequence complement
ctctgcttagaatttgggggaa

SEQ ID NO: 20458 - DNA, 22 bp, Artificial Sequence
  Target B2M Sequence complement
tctgcttagaatttgggggaaa

SEQ ID NO: 20459 - DNA, 22 bp, Artificial Sequence
  Target B2M Sequence complement
ctgcttagaatttgggggaaaa

SEQ ID NO: 20460 - DNA, 22 bp, Artificial Sequence
  Target B2M Sequence complement
tgcttagaatttgggggaaaat

SEQ ID NO: 20461 - DNA, 22 bp, Artificial Sequence
  Target B2M Sequence complement
gcttagaatttgggggaaaatt

SEQ ID NO: 20462 - DNA, 22 bp, Artificial Sequence
  Target B2M Sequence complement
cttagaatttgggggaaaattt

SEQ ID NO: 20463 - DNA, 22 bp, Artificial Sequence
  Target B2M Sequence complement
ttagaatttgggggaaaattta

SEQ ID NO: 20464 - DNA, 22 bp, Artificial Sequence
  Target B2M Sequence complement
tagaatttgggggaaaatttag

SEQ ID NO: 20465 - DNA, 22 bp, Artificial Sequence
  Target B2M Sequence complement
agaatttgggggaaaatttaga

SEQ ID NO: 20466 - DNA, 22 bp, Artificial Sequence
  Target B2M Sequence complement
gaatttgggggaaaatttagaa

SEQ ID NO: 20467 - DNA, 22 bp, Artificial Sequence
  Target B2M Sequence complement
aatttgggggaaaatttagaaa

SEQ ID NO: 20468 - DNA, 22 bp, Artificial Sequence
  Target B2M Sequence complement
atttgggggaaaatttagaaat

SEQ ID NO: 20469 - DNA, 22 bp, Artificial Sequence
  Target B2M Sequence complement
tttgggggaaaatttagaaata

SEQ ID NO: 20470 - DNA, 22 bp, Artificial Sequence
  Target B2M Sequence complement
ttgggggaaaatttagaaatat

SEQ ID NO: 20471 - DNA, 22 bp, Artificial Sequence
  Target B2M Sequence complement
tgggggaaaatttagaaatata

SEQ ID NO: 20472 - DNA, 22 bp, Artificial Sequence
  Target B2M Sequence complement
gggggaaaatttagaaatataa

SEQ ID NO: 20473 - DNA, 22 bp, Artificial Sequence
  Target B2M Sequence complement
tgtggttaatctggtttatttt

SEQ ID NO: 20474 - DNA, 22 bp, Artificial Sequence
  Target B2M Sequence complement
gtggttaatctggtttattttt

SEQ ID NO: 20475 - DNA, 22 bp, Artificial Sequence
  Target B2M Sequence complement
tggttaatctggtttatttttg

SEQ ID NO: 20476 - DNA, 22 bp, Artificial Sequence
  Target B2M Sequence complement
ggttaatctggtttatttttgt

SEQ ID NO: 20477 - DNA, 22 bp, Artificial Sequence
  Target B2M Sequence complement
taatctggtttatttttgttcc

SEQ ID NO: 20478 - DNA, 22 bp, Artificial Sequence
  Target B2M Sequence complement
aatctggtttatttttgttcca

SEQ ID NO: 20479 - DNA, 22 bp, Artificial Sequence
  Target B2M Sequence complement
atctggtttatttttgttccac

SEQ ID NO: 20480 - DNA, 22 bp, Artificial Sequence
  Target B2M Sequence complement
tctggtttatttttgttccaca

SEQ ID NO: 20481 - DNA, 22 bp, Artificial Sequence
  Target B2M Sequence complement
ctggtttatttttgttccacaa

SEQ ID NO: 20482 - DNA, 22 bp, Artificial Sequence
  Target B2M Sequence complement
tggtttatttttgttccacaag

SEQ ID NO: 20483 - DNA, 22 bp, Artificial Sequence
  Target B2M Sequence complement
ggtttatttttgttccacaagt

SEQ ID NO: 20484 - DNA, 22 bp, Artificial Sequence
  Target B2M Sequence complement
gtttatttttgttccacaagtt

SEQ ID NO: 20485 - DNA, 18 bp, Artificial Sequence
  Target B2M Sequence complement
agctgacagcattcgggc

SEQ ID NO: 20486 - DNA, 18 bp, Artificial Sequence
  Target B2M Sequence complement
gctgacagcattcgggcc

SEQ ID NO: 20487 - DNA, 18 bp, Artificial Sequence
  Target B2M Sequence complement
ctgacagcattcgggccg

SEQ ID NO: 20488 - DNA, 18 bp, Artificial Sequence
  Target B2M Sequence complement
tgacagcattcgggccga

SEQ ID NO: 20489 - DNA, 18 bp, Artificial Sequence
  Target B2M Sequence complement
gacagcattcgggccgag

SEQ ID NO: 20490 - DNA, 18 bp, Artificial Sequence
  Target B2M Sequence complement
acagcattcgggccgaga

SEQ ID NO: 20491 - DNA, 18 bp, Artificial Sequence
  Target B2M Sequence complement
cagcattcgggccgagat

SEQ ID NO: 20492 - DNA, 18 bp, Artificial Sequence
  Target B2M Sequence complement
agcattcgggccgagatg

SEQ ID NO: 20493 - DNA, 18 bp, Artificial Sequence
  Target B2M Sequence complement
gcattcgggccgagatgt

SEQ ID NO: 20494 - DNA, 18 bp, Artificial Sequence
  Target B2M Sequence complement
cattcgggccgagatgtc

SEQ ID NO: 20495 - DNA, 18 bp, Artificial Sequence
  Target B2M Sequence complement
ttcgggccgagatgtctc

SEQ ID NO: 20496 - DNA, 18 bp, Artificial Sequence
  Target B2M Sequence complement
tcgggccgagatgtctcg

SEQ ID NO: 20497 - DNA, 18 bp, Artificial Sequence
  Target B2M Sequence complement
cgggccgagatgtctcgc

SEQ ID NO: 20498 - DNA, 18 bp, Artificial Sequence
  Target B2M Sequence complement
gggccgagatgtctcgct

SEQ ID NO: 20499 - DNA, 18 bp, Artificial Sequence
  Target B2M Sequence complement
ggccgagatgtctcgctc

SEQ ID NO: 20500 - DNA, 18 bp, Artificial Sequence
  Target B2M Sequence complement
gccgagatgtctcgctcc

SEQ ID NO: 20501 - DNA, 18 bp, Artificial Sequence
  Target B2M Sequence complement
ccgagatgtctcgctccg

SEQ ID NO: 20502 - DNA, 18 bp, Artificial Sequence
  Target B2M Sequence complement
cgagatgtctcgctccgt

SEQ ID NO: 20503 - DNA, 18 bp, Artificial Sequence
  Target B2M Sequence complement
gagatgtctcgctccgtg

SEQ ID NO: 20504 - DNA, 18 bp, Artificial Sequence
  Target B2M Sequence complement
agatgtctcgctccgtgg

SEQ ID NO: 20505 - DNA, 18 bp, Artificial Sequence
  Target B2M Sequence complement
gatgtctcgctccgtggc

SEQ ID NO: 20506 - DNA, 18 bp, Artificial Sequence
  Target B2M Sequence complement
atgtctcgctccgtggcc

SEQ ID NO: 20507 - DNA, 18 bp, Artificial Sequence
  Target B2M Sequence complement
tgtctcgctccgtggcct

SEQ ID NO: 20508 - DNA, 18 bp, Artificial Sequence
  Target B2M Sequence complement
gtctcgctccgtggcctt

SEQ ID NO: 20509 - DNA, 18 bp, Artificial Sequence
  Target B2M Sequence complement
tctcgctccgtggcctta

SEQ ID NO: 20510 - DNA, 18 bp, Artificial Sequence
  Target B2M Sequence complement
ctcgctccgtggccttag

SEQ ID NO: 20511 - DNA, 18 bp, Artificial Sequence
  Target B2M Sequence complement
tcgctccgtggccttagc

SEQ ID NO: 20512 - DNA, 18 bp, Artificial Sequence
  Target B2M Sequence complement
cgctccgtggccttagct

SEQ ID NO: 20513 - DNA, 18 bp, Artificial Sequence
  Target B2M Sequence complement
gctccgtggccttagctg

SEQ ID NO: 20514 - DNA, 18 bp, Artificial Sequence
  Target B2M Sequence complement
ctccgtggccttagctgt

SEQ ID NO: 20515 - DNA, 18 bp, Artificial Sequence
  Target B2M Sequence complement
tccgtggccttagctgtg

SEQ ID NO: 20516 - DNA, 18 bp, Artificial Sequence
  Target B2M Sequence complement
ccgtggccttagctgtgc

SEQ ID NO: 20517 - DNA, 18 bp, Artificial Sequence
  Target B2M Sequence complement
cgtggccttagctgtgct

SEQ ID NO: 20518 - DNA, 18 bp, Artificial Sequence
  Target B2M Sequence complement
gtggccttagctgtgctc

SEQ ID NO: 20519 - DNA, 18 bp, Artificial Sequence
  Target B2M Sequence complement
tggccttagctgtgctcg

SEQ ID NO: 20520 - DNA, 18 bp, Artificial Sequence
  Target B2M Sequence complement
ggccttagctgtgctcgc

SEQ ID NO: 20521 - DNA, 18 bp, Artificial Sequence
  Target B2M Sequence complement
gccttagctgtgctcgcg

SEQ ID NO: 20522 - DNA, 18 bp, Artificial Sequence
  Target B2M Sequence complement
ccttagctgtgctcgcgc

SEQ ID NO: 20523 - DNA, 18 bp, Artificial Sequence
  Target B2M Sequence complement
cttagctgtgctcgcgct

SEQ ID NO: 20524 - DNA, 18 bp, Artificial Sequence
  Target B2M Sequence complement
tagctgtgctcgcgctac

SEQ ID NO: 20525 - DNA, 18 bp, Artificial Sequence
  Target B2M Sequence complement
agctgtgctcgcgctact

SEQ ID NO: 20526 - DNA, 18 bp, Artificial Sequence
  Target B2M Sequence complement
gctgtgctcgcgctactc

SEQ ID NO: 20527 - DNA, 18 bp, Artificial Sequence
  Target B2M Sequence complement
ctgtgctcgcgctactct

SEQ ID NO: 20528 - DNA, 18 bp, Artificial Sequence
  Target B2M Sequence complement
tgtgctcgcgctactctc

SEQ ID NO: 20529 - DNA, 18 bp, Artificial Sequence
  Target B2M Sequence complement
gtgctcgcgctactctct

SEQ ID NO: 20530 - DNA, 18 bp, Artificial Sequence
  Target B2M Sequence complement
tgctcgcgctactctctc

SEQ ID NO: 20531 - DNA, 18 bp, Artificial Sequence
  Target B2M Sequence complement
gctcgcgctactctctct

SEQ ID NO: 20532 - DNA, 18 bp, Artificial Sequence
  Target B2M Sequence complement
ctctttctggcctggagg

SEQ ID NO: 20533 - DNA, 18 bp, Artificial Sequence
  Target B2M Sequence complement
tctttctggcctggaggc

SEQ ID NO: 20534 - DNA, 18 bp, Artificial Sequence
  Target B2M Sequence complement
ctttctggcctggaggct

SEQ ID NO: 20535 - DNA, 18 bp, Artificial Sequence
  Target B2M Sequence complement
tctggcctggaggctatc

SEQ ID NO: 20536 - DNA, 18 bp, Artificial Sequence
  Target B2M Sequence complement
ctggcctggaggctatcc

SEQ ID NO: 20537 - DNA, 18 bp, Artificial Sequence
  Target B2M Sequence complement
tggcctggaggctatcca

SEQ ID NO: 20538 - DNA, 18 bp, Artificial Sequence
  Target B2M Sequence complement
ggcctggaggctatccag

SEQ ID NO: 20539 - DNA, 18 bp, Artificial Sequence
  Target B2M Sequence complement
gcctggaggctatccagc

SEQ ID NO: 20540 - DNA, 18 bp, Artificial Sequence
  Target B2M Sequence complement
cctggaggctatccagcg

SEQ ID NO: 20541 - DNA, 18 bp, Artificial Sequence
  Target B2M Sequence complement
ctggaggctatccagcgt

SEQ ID NO: 20542 - DNA, 18 bp, Artificial Sequence
  Target B2M Sequence complement
ggaggctatccagcgtac

SEQ ID NO: 20543 - DNA, 18 bp, Artificial Sequence
  Target B2M Sequence complement
ggctatccagcgtactcc

SEQ ID NO: 20544 - DNA, 18 bp, Artificial Sequence
  Target B2M Sequence complement
gagtatgcctgccgtgtg

SEQ ID NO: 20545 - DNA, 18 bp, Artificial Sequence
  Target B2M Sequence complement
atgcctgccgtgtgaacc

SEQ ID NO: 20546 - DNA, 18 bp, Artificial Sequence
  Target B2M Sequence complement
tgcctgccgtgtgaacca

SEQ ID NO: 20547 - DNA, 18 bp, Artificial Sequence
  Target B2M Sequence complement
gcctgccgtgtgaaccat

SEQ ID NO: 20548 - DNA, 18 bp, Artificial Sequence
  Target B2M Sequence complement
cctgccgtgtgaaccatg

SEQ ID NO: 20549 - DNA, 18 bp, Artificial Sequence
  Target B2M Sequence complement
ttgcttgctttttaatat

SEQ ID NO: 20550 - DNA, 18 bp, Artificial Sequence
  Target B2M Sequence complement
tgcttgctttttaatatt

SEQ ID NO: 20551 - DNA, 18 bp, Artificial Sequence
  Target B2M Sequence complement
cttgctttttaatattga

SEQ ID NO: 20552 - DNA, 18 bp, Artificial Sequence
  Target B2M Sequence complement
ttgctttttaatattgat

SEQ ID NO: 20553 - DNA, 18 bp, Artificial Sequence
  Target B2M Sequence complement
tgctttttaatattgata

SEQ ID NO: 20554 - DNA, 18 bp, Artificial Sequence
  Target B2M Sequence complement
gctttttaatattgatat

SEQ ID NO: 20555 - DNA, 18 bp, Artificial Sequence
  Target B2M Sequence complement
ctttttaatattgatatg

SEQ ID NO: 20556 - DNA, 18 bp, Artificial Sequence
  Target B2M Sequence complement
tttttaatattgatatgc

SEQ ID NO: 20557 - DNA, 18 bp, Artificial Sequence
  Target B2M Sequence complement
ttttaatattgatatgct

SEQ ID NO: 20558 - DNA, 18 bp, Artificial Sequence
  Target B2M Sequence complement
tttaatattgatatgctt

SEQ ID NO: 20559 - DNA, 18 bp, Artificial Sequence
  Target B2M Sequence complement
ttaatattgatatgctta

SEQ ID NO: 20560 - DNA, 18 bp, Artificial Sequence
  Target B2M Sequence complement
taatattgatatgcttat

SEQ ID NO: 20561 - DNA, 18 bp, Artificial Sequence
  Target B2M Sequence complement
aatattgatatgcttata

SEQ ID NO: 20562 - DNA, 18 bp, Artificial Sequence
  Target B2M Sequence complement
atattgatatgcttatac

SEQ ID NO: 20563 - DNA, 18 bp, Artificial Sequence
  Target B2M Sequence complement
tattgatatgcttataca

SEQ ID NO: 20564 - DNA, 18 bp, Artificial Sequence
  Target B2M Sequence complement
ttatacacttacacttta

SEQ ID NO: 20565 - DNA, 18 bp, Artificial Sequence
  Target B2M Sequence complement
tatacacttacactttat

SEQ ID NO: 20566 - DNA, 18 bp, Artificial Sequence
  Target B2M Sequence complement
aaaatgtagggttataat

SEQ ID NO: 20567 - DNA, 18 bp, Artificial Sequence
  Target B2M Sequence complement
aaatgtagggttataata

SEQ ID NO: 20568 - DNA, 18 bp, Artificial Sequence
  Target B2M Sequence complement
aatgtagggttataataa

SEQ ID NO: 20569 - DNA, 18 bp, Artificial Sequence
  Target B2M Sequence complement
atgtagggttataataat

SEQ ID NO: 20570 - DNA, 18 bp, Artificial Sequence
  Target B2M Sequence complement
tagggttataataatgtt

SEQ ID NO: 20571 - DNA, 18 bp, Artificial Sequence
  Target B2M Sequence complement
agggttataataatgtta

SEQ ID NO: 20572 - DNA, 18 bp, Artificial Sequence
  Target B2M Sequence complement
gggttataataatgttaa

SEQ ID NO: 20573 - DNA, 18 bp, Artificial Sequence
  Target B2M Sequence complement
ggttataataatgttaac

SEQ ID NO: 20574 - DNA, 18 bp, Artificial Sequence
  Target B2M Sequence complement
gttataataatgttaaca

SEQ ID NO: 20575 - DNA, 18 bp, Artificial Sequence
  Target B2M Sequence complement
ttataataatgttaacat

SEQ ID NO: 20576 - DNA, 18 bp, Artificial Sequence
  Target B2M Sequence complement
tataataatgttaacatg

SEQ ID NO: 20577 - DNA, 18 bp, Artificial Sequence
  Target B2M Sequence complement
ataataatgttaacatgg

SEQ ID NO: 20578 - DNA, 18 bp, Artificial Sequence
  Target B2M Sequence complement
taataatgttaacatgga

SEQ ID NO: 20579 - DNA, 18 bp, Artificial Sequence
  Target B2M Sequence complement
acatgatcttctttataa

SEQ ID NO: 20580 - DNA, 18 bp, Artificial Sequence
  Target B2M Sequence complement
catgatcttctttataat

SEQ ID NO: 20581 - DNA, 18 bp, Artificial Sequence
  Target B2M Sequence complement
atgatcttctttataatt

SEQ ID NO: 20582 - DNA, 18 bp, Artificial Sequence
  Target B2M Sequence complement
tgatcttctttataattc

SEQ ID NO: 20583 - DNA, 18 bp, Artificial Sequence
  Target B2M Sequence complement
gatcttctttataattct

SEQ ID NO: 20584 - DNA, 18 bp, Artificial Sequence
  Target B2M Sequence complement
atcttctttataattcta

SEQ ID NO: 20585 - DNA, 18 bp, Artificial Sequence
  Target B2M Sequence complement
tcttctttataattctac

SEQ ID NO: 20586 - DNA, 18 bp, Artificial Sequence
  Target B2M Sequence complement
cttctttataattctact

SEQ ID NO: 20587 - DNA, 18 bp, Artificial Sequence
  Target B2M Sequence complement
ttctttataattctactt

SEQ ID NO: 20588 - DNA, 18 bp, Artificial Sequence
  Target B2M Sequence complement
tctttataattctacttt

SEQ ID NO: 20589 - DNA, 18 bp, Artificial Sequence
  Target B2M Sequence complement
ctttataattctactttg

SEQ ID NO: 20590 - DNA, 18 bp, Artificial Sequence
  Target B2M Sequence complement
tttataattctactttga

SEQ ID NO: 20591 - DNA, 18 bp, Artificial Sequence
  Target B2M Sequence complement
ttataattctactttgag

SEQ ID NO: 20592 - DNA, 18 bp, Artificial Sequence
  Target B2M Sequence complement
tataattctactttgagt

SEQ ID NO: 20593 - DNA, 18 bp, Artificial Sequence
  Target B2M Sequence complement
ctgagcaggttgctccac

SEQ ID NO: 20594 - DNA, 18 bp, Artificial Sequence
  Target B2M Sequence complement
gagcaggttgctccacag

SEQ ID NO: 20595 - DNA, 18 bp, Artificial Sequence
  Target B2M Sequence complement
agcaggttgctccacagg

SEQ ID NO: 20596 - DNA, 18 bp, Artificial Sequence
  Target B2M Sequence complement
gcaggttgctccacaggt

SEQ ID NO: 20597 - DNA, 18 bp, Artificial Sequence
  Target B2M Sequence complement
ggttgctccacaggtagc

SEQ ID NO: 20598 - DNA, 18 bp, Artificial Sequence
  Target B2M Sequence complement
caggtagctctaggaggg

SEQ ID NO: 20599 - DNA, 18 bp, Artificial Sequence
  Target B2M Sequence complement
aggtagctctaggagggc

SEQ ID NO: 20600 - DNA, 18 bp, Artificial Sequence
  Target B2M Sequence complement
ggtagctctaggagggct

SEQ ID NO: 20601 - DNA, 18 bp, Artificial Sequence
  Target B2M Sequence complement
gtagctctaggagggctg

SEQ ID NO: 20602 - DNA, 18 bp, Artificial Sequence
  Target B2M Sequence complement
tagctctaggagggctgg

SEQ ID NO: 20603 - DNA, 18 bp, Artificial Sequence
  Target B2M Sequence complement
agctctaggagggctggc

SEQ ID NO: 20604 - DNA, 18 bp, Artificial Sequence
  Target B2M Sequence complement
gctctaggagggctggca

SEQ ID NO: 20605 - DNA, 18 bp, Artificial Sequence
  Target B2M Sequence complement
ctctaggagggctggcaa

SEQ ID NO: 20606 - DNA, 18 bp, Artificial Sequence
  Target B2M Sequence complement
tctaggagggctggcaac

SEQ ID NO: 20607 - DNA, 18 bp, Artificial Sequence
  Target B2M Sequence complement
ctaggagggctggcaact

SEQ ID NO: 20608 - DNA, 18 bp, Artificial Sequence
  Target B2M Sequence complement
ggagggctggcaacttag

SEQ ID NO: 20609 - DNA, 18 bp, Artificial Sequence
  Target B2M Sequence complement
gggctggcaacttagagg

SEQ ID NO: 20610 - DNA, 18 bp, Artificial Sequence
  Target B2M Sequence complement
ggcaacttagaggtgggg

SEQ ID NO: 20611 - DNA, 18 bp, Artificial Sequence
  Target B2M Sequence complement
cttagaggtggggagcag

SEQ ID NO: 20612 - DNA, 18 bp, Artificial Sequence
  Target B2M Sequence complement
tagaggtggggagcagag

SEQ ID NO: 20613 - DNA, 18 bp, Artificial Sequence
  Target B2M Sequence complement
agaggtggggagcagaga

SEQ ID NO: 20614 - DNA, 18 bp, Artificial Sequence
  Target B2M Sequence complement
gaggtggggagcagagaa

SEQ ID NO: 20615 - DNA, 18 bp, Artificial Sequence
  Target B2M Sequence complement
ataagttaacttccaatt

SEQ ID NO: 20616 - DNA, 18 bp, Artificial Sequence
  Target B2M Sequence complement
taagttaacttccaattt

SEQ ID NO: 20617 - DNA, 18 bp, Artificial Sequence
  Target B2M Sequence complement
aagttaacttccaattta

SEQ ID NO: 20618 - DNA, 18 bp, Artificial Sequence
  Target B2M Sequence complement
ttaacttccaatttacat

SEQ ID NO: 20619 - DNA, 18 bp, Artificial Sequence
  Target B2M Sequence complement
taacttccaatttacata

SEQ ID NO: 20620 - DNA, 18 bp, Artificial Sequence
  Target B2M Sequence complement
gggaaaatttagaaatat

SEQ ID NO: 20621 - DNA, 18 bp, Artificial Sequence
  Target B2M Sequence complement
ggaaaatttagaaatata

SEQ ID NO: 20622 - DNA, 18 bp, Artificial Sequence
  Target B2M Sequence complement
gaaaatttagaaatataa

SEQ ID NO: 20623 - DNA, 18 bp, Artificial Sequence
  Target B2M Sequence complement
aaaatttagaaatataat

SEQ ID NO: 20624 - DNA, 18 bp, Artificial Sequence
  Target B2M Sequence complement
aaatttagaaatataatt

SEQ ID NO: 20625 - DNA, 18 bp, Artificial Sequence
  Target B2M Sequence complement
aatttagaaatataattg

SEQ ID NO: 20626 - DNA, 18 bp, Artificial Sequence
  Target B2M Sequence complement
atttagaaatataattga

SEQ ID NO: 20627 - DNA, 18 bp, Artificial Sequence
  Target B2M Sequence complement
tttagaaatataattgac

SEQ ID NO: 20628 - DNA, 18 bp, Artificial Sequence
  Target B2M Sequence complement
ttagaaatataattgaca

SEQ ID NO: 20629 - DNA, 18 bp, Artificial Sequence
  Target B2M Sequence complement
tagaaatataattgacag

SEQ ID NO: 20630 - DNA, 18 bp, Artificial Sequence
  Target B2M Sequence complement
aaatataattgacaggat

SEQ ID NO: 20631 - DNA, 18 bp, Artificial Sequence
  Target B2M Sequence complement
aatataattgacaggatt

SEQ ID NO: 20632 - DNA, 18 bp, Artificial Sequence
  Target B2M Sequence complement
atataattgacaggatta

SEQ ID NO: 20633 - DNA, 18 bp, Artificial Sequence
  Target B2M Sequence complement
tataattgacaggattat

SEQ ID NO: 20634 - DNA, 18 bp, Artificial Sequence
  Target B2M Sequence complement
ataattgacaggattatt

SEQ ID NO: 20635 - DNA, 18 bp, Artificial Sequence
  Target B2M Sequence complement
gattattggaaatttgtt

SEQ ID NO: 20636 - DNA, 18 bp, Artificial Sequence
  Target B2M Sequence complement
attattggaaatttgtta

SEQ ID NO: 20637 - DNA, 18 bp, Artificial Sequence
  Target B2M Sequence complement
ttattggaaatttgttat

SEQ ID NO: 20638 - DNA, 18 bp, Artificial Sequence
  Target B2M Sequence complement
tattggaaatttgttata

SEQ ID NO: 20639 - DNA, 18 bp, Artificial Sequence
  Target B2M Sequence complement
attggaaatttgttataa

SEQ ID NO: 20640 - DNA, 18 bp, Artificial Sequence
  Target B2M Sequence complement
ttggaaatttgttataat

SEQ ID NO: 20641 - DNA, 18 bp, Artificial Sequence
  Target B2M Sequence complement
tggaaatttgttataatg

SEQ ID NO: 20642 - DNA, 18 bp, Artificial Sequence
  Target B2M Sequence complement
ggaaatttgttataatga

SEQ ID NO: 20643 - DNA, 18 bp, Artificial Sequence
  Target B2M Sequence complement
gaaatttgttataatgaa

SEQ ID NO: 20644 - DNA, 18 bp, Artificial Sequence
  Target B2M Sequence complement
aaatttgttataatgaat

SEQ ID NO: 20645 - DNA, 18 bp, Artificial Sequence
  Target B2M Sequence complement
aatttgttataatgaatg

SEQ ID NO: 20646 - DNA, 18 bp, Artificial Sequence
  Target B2M Sequence complement
atttgttataatgaatga

SEQ ID NO: 20647 - DNA, 18 bp, Artificial Sequence
  Target B2M Sequence complement
tttgttataatgaatgaa

SEQ ID NO: 20648 - DNA, 18 bp, Artificial Sequence
  Target B2M Sequence complement
ttgttataatgaatgaaa

SEQ ID NO: 20649 - DNA, 18 bp, Artificial Sequence
  Target B2M Sequence complement
tgttataatgaatgaaac

SEQ ID NO: 20650 - DNA, 18 bp, Artificial Sequence
  Target B2M Sequence complement
gttataatgaatgaaaca

SEQ ID NO: 20651 - DNA, 18 bp, Artificial Sequence
  Target B2M Sequence complement
ttataatgaatgaaacat

SEQ ID NO: 20652 - DNA, 18 bp, Artificial Sequence
  Target B2M Sequence complement
tataatgaatgaaacatt

SEQ ID NO: 20653 - DNA, 18 bp, Artificial Sequence
  Target B2M Sequence complement
ataatgaatgaaacattt

SEQ ID NO: 20654 - DNA, 18 bp, Artificial Sequence
  Target B2M Sequence complement
taatgaatgaaacatttt

SEQ ID NO: 20655 - DNA, 18 bp, Artificial Sequence
  Target B2M Sequence complement
aatgaatgaaacattttg

SEQ ID NO: 20656 - DNA, 18 bp, Artificial Sequence
  Target B2M Sequence complement
atgaatgaaacattttgt

SEQ ID NO: 20657 - DNA, 18 bp, Artificial Sequence
  Target B2M Sequence complement
aatgaaacattttgtcat

SEQ ID NO: 20658 - DNA, 18 bp, Artificial Sequence
  Target B2M Sequence complement
atgaaacattttgtcata

SEQ ID NO: 20659 - DNA, 18 bp, Artificial Sequence
  Target B2M Sequence complement
tgaaacattttgtcatat

SEQ ID NO: 20660 - DNA, 18 bp, Artificial Sequence
  Target B2M Sequence complement
gaaacattttgtcatata

SEQ ID NO: 20661 - DNA, 18 bp, Artificial Sequence
  Target B2M Sequence complement
aaacattttgtcatataa

SEQ ID NO: 20662 - DNA, 18 bp, Artificial Sequence
  Target B2M Sequence complement
aacattttgtcatataag

SEQ ID NO: 20663 - DNA, 18 bp, Artificial Sequence
  Target B2M Sequence complement
acattttgtcatataaga

SEQ ID NO: 20664 - DNA, 18 bp, Artificial Sequence
  Target B2M Sequence complement
cattttgtcatataagat

SEQ ID NO: 20665 - DNA, 18 bp, Artificial Sequence
  Target B2M Sequence complement
attttgtcatataagatt

SEQ ID NO: 20666 - DNA, 18 bp, Artificial Sequence
  Target B2M Sequence complement
ttttgtcatataagattc

SEQ ID NO: 20667 - DNA, 18 bp, Artificial Sequence
  Target B2M Sequence complement
tttgtcatataagattca

SEQ ID NO: 20668 - DNA, 18 bp, Artificial Sequence
  Target B2M Sequence complement
ttgtcatataagattcat

SEQ ID NO: 20669 - DNA, 18 bp, Artificial Sequence
  Target B2M Sequence complement
tgtcatataagattcata

SEQ ID NO: 20670 - DNA, 18 bp, Artificial Sequence
  Target B2M Sequence complement
gtcatataagattcatat

SEQ ID NO: 20671 - DNA, 18 bp, Artificial Sequence
  Target B2M Sequence complement
tcatataagattcatatt

SEQ ID NO: 20672 - DNA, 18 bp, Artificial Sequence
  Target B2M Sequence complement
catataagattcatattt

SEQ ID NO: 20673 - DNA, 18 bp, Artificial Sequence
  Target B2M Sequence complement
atataagattcatattta

SEQ ID NO: 20674 - DNA, 18 bp, Artificial Sequence
  Target B2M Sequence complement
tataagattcatatttac

SEQ ID NO: 20675 - DNA, 18 bp, Artificial Sequence
  Target B2M Sequence complement
ataagattcatatttact

SEQ ID NO: 20676 - DNA, 18 bp, Artificial Sequence
  Target B2M Sequence complement
taagattcatatttactt

SEQ ID NO: 20677 - DNA, 18 bp, Artificial Sequence
  Target B2M Sequence complement
aagattcatatttacttc

SEQ ID NO: 20678 - DNA, 18 bp, Artificial Sequence
  Target B2M Sequence complement
agattcatatttacttct

SEQ ID NO: 20679 - DNA, 18 bp, Artificial Sequence
  Target B2M Sequence complement
gattcatatttacttctt

SEQ ID NO: 20680 - DNA, 18 bp, Artificial Sequence
  Target B2M Sequence complement
attcatatttacttctta

SEQ ID NO: 20681 - DNA, 18 bp, Artificial Sequence
  Target B2M Sequence complement
ttcatatttacttcttat

SEQ ID NO: 20682 - DNA, 18 bp, Artificial Sequence
  Target B2M Sequence complement
tcatatttacttcttata

SEQ ID NO: 20683 - DNA, 18 bp, Artificial Sequence
  Target B2M Sequence complement
catatttacttcttatac

SEQ ID NO: 20684 - DNA, 18 bp, Artificial Sequence
  Target B2M Sequence complement
atatttacttcttataca

SEQ ID NO: 20685 - DNA, 18 bp, Artificial Sequence
  Target B2M Sequence complement
tatttacttcttatacat

SEQ ID NO: 20686 - DNA, 18 bp, Artificial Sequence
  Target B2M Sequence complement
atttacttcttatacatt

SEQ ID NO: 20687 - DNA, 18 bp, Artificial Sequence
  Target B2M Sequence complement
tttacttcttatacattt

SEQ ID NO: 20688 - DNA, 18 bp, Artificial Sequence
  Target B2M Sequence complement
ttacttcttatacatttg

SEQ ID NO: 20689 - DNA, 18 bp, Artificial Sequence
  Target B2M Sequence complement
tacttcttatacatttga

SEQ ID NO: 20690 - DNA, 18 bp, Artificial Sequence
  Target B2M Sequence complement
acttcttatacatttgat

SEQ ID NO: 20691 - DNA, 18 bp, Artificial Sequence
  Target B2M Sequence complement
cttcttatacatttgata

SEQ ID NO: 20692 - DNA, 18 bp, Artificial Sequence
  Target B2M Sequence complement
ttcttatacatttgataa

SEQ ID NO: 20693 - DNA, 18 bp, Artificial Sequence
  Target B2M Sequence complement
tcttatacatttgataaa

SEQ ID NO: 20694 - DNA, 18 bp, Artificial Sequence
  Target B2M Sequence complement
cttatacatttgataaag

SEQ ID NO: 20695 - DNA, 18 bp, Artificial Sequence
  Target B2M Sequence complement
ttatacatttgataaagt

SEQ ID NO: 20696 - DNA, 18 bp, Artificial Sequence
  Target B2M Sequence complement
tatacatttgataaagta

SEQ ID NO: 20697 - DNA, 18 bp, Artificial Sequence
  Target B2M Sequence complement
atacatttgataaagtaa

SEQ ID NO: 20698 - DNA, 18 bp, Artificial Sequence
  Target B2M Sequence complement
tacatttgataaagtaag

SEQ ID NO: 20699 - DNA, 18 bp, Artificial Sequence
  Target B2M Sequence complement
gttaatctggtttatttt

SEQ ID NO: 20700 - DNA, 18 bp, Artificial Sequence
  Target B2M Sequence complement
ttaatctggtttattttt

SEQ ID NO: 20701 - DNA, 18 bp, Artificial Sequence
  Target B2M Sequence complement
taatctggtttatttttg

SEQ ID NO: 20702 - DNA, 18 bp, Artificial Sequence
  Target B2M Sequence complement
aatctggtttatttttgt

SEQ ID NO: 20703 - DNA, 18 bp, Artificial Sequence
  Target B2M Sequence complement
atctggtttatttttgtt

SEQ ID NO: 20704 - DNA, 18 bp, Artificial Sequence
  Target B2M Sequence complement
tttatttttgttccacaa

SEQ ID NO: 20705 - DNA, 18 bp, Artificial Sequence
  Target B2M Sequence complement
ttccacaagttaaataaa

SEQ ID NO: 20706 - DNA, 18 bp, Artificial Sequence
  Target B2M Sequence complement
tccacaagttaaataaat

SEQ ID NO: 20707 - DNA, 18 bp, Artificial Sequence
  Target B2M Sequence complement
cacaagttaaataaatca

SEQ ID NO: 20708 - DNA, 18 bp, Artificial Sequence
  Target B2M Sequence complement
acaagttaaataaatcat

SEQ ID NO: 20709 - DNA, 18 bp, Artificial Sequence
  Target B2M Sequence complement
caagttaaataaatcata

SEQ ID NO: 20710 - DNA, 18 bp, Artificial Sequence
  Target B2M Sequence complement
aagttaaataaatcataa

SEQ ID NO: 20711 - DNA, 18 bp, Artificial Sequence
  Target B2M Sequence complement
agttaaataaatcataaa

SEQ ID NO: 20712 - DNA, 18 bp, Artificial Sequence
  Target B2M Sequence complement
gttaaataaatcataaaa

SEQ ID NO: 20713 - DNA, 18 bp, Artificial Sequence
  Target B2M Sequence complement
ttaaataaatcataaaac

SEQ ID NO: 20714 - DNA, 18 bp, Artificial Sequence
  Target B2M Sequence complement
taaataaatcataaaact

SEQ ID NO: 20715 - DNA, 18 bp, Artificial Sequence
  Target B2M Sequence complement
aaataaatcataaaactt

SEQ ID NO: 20716 - DNA, 18 bp, Artificial Sequence
  Target B2M Sequence complement
aataaatcataaaacttg

SEQ ID NO: 20717 - DNA, 18 bp, Artificial Sequence
  Target B2M Sequence complement
ataaatcataaaacttga

SEQ ID NO: 20718 - DNA, 19 bp, Artificial Sequence
  Target B2M Sequence complement
agctgacagcattcgggcc

SEQ ID NO: 20719 - DNA, 19 bp, Artificial Sequence
  Target B2M Sequence complement
gctgacagcattcgggccg

SEQ ID NO: 20720 - DNA, 19 bp, Artificial Sequence
  Target B2M Sequence complement
ctgacagcattcgggccga

SEQ ID NO: 20721 - DNA, 19 bp, Artificial Sequence
  Target B2M Sequence complement
tgacagcattcgggccgag

SEQ ID NO: 20722 - DNA, 19 bp, Artificial Sequence
  Target B2M Sequence complement
gacagcattcgggccgaga

SEQ ID NO: 20723 - DNA, 19 bp, Artificial Sequence
  Target B2M Sequence complement
cagcattcgggccgagatg

SEQ ID NO: 20724 - DNA, 19 bp, Artificial Sequence
  Target B2M Sequence complement
gcattcgggccgagatgtc

SEQ ID NO: 20725 - DNA, 19 bp, Artificial Sequence
  Target B2M Sequence complement
ttcgggccgagatgtctcg

SEQ ID NO: 20726 - DNA, 19 bp, Artificial Sequence
  Target B2M Sequence complement
tcgggccgagatgtctcgc

SEQ ID NO: 20727 - DNA, 19 bp, Artificial Sequence
  Target B2M Sequence complement
cgggccgagatgtctcgct

SEQ ID NO: 20728 - DNA, 19 bp, Artificial Sequence
  Target B2M Sequence complement
gggccgagatgtctcgctc

SEQ ID NO: 20729 - DNA, 19 bp, Artificial Sequence
  Target B2M Sequence complement
ggccgagatgtctcgctcc

SEQ ID NO: 20730 - DNA, 19 bp, Artificial Sequence
  Target B2M Sequence complement
gccgagatgtctcgctccg

SEQ ID NO: 20731 - DNA, 19 bp, Artificial Sequence
  Target B2M Sequence complement
ccgagatgtctcgctccgt

SEQ ID NO: 20732 - DNA, 19 bp, Artificial Sequence
  Target B2M Sequence complement
cgagatgtctcgctccgtg

SEQ ID NO: 20733 - DNA, 19 bp, Artificial Sequence
  Target B2M Sequence complement
gagatgtctcgctccgtgg

SEQ ID NO: 20734 - DNA, 19 bp, Artificial Sequence
  Target B2M Sequence complement
agatgtctcgctccgtggc

SEQ ID NO: 20735 - DNA, 19 bp, Artificial Sequence
  Target B2M Sequence complement
gatgtctcgctccgtggcc

SEQ ID NO: 20736 - DNA, 19 bp, Artificial Sequence
  Target B2M Sequence complement
atgtctcgctccgtggcct

SEQ ID NO: 20737 - DNA, 19 bp, Artificial Sequence
  Target B2M Sequence complement
tgtctcgctccgtggcctt

SEQ ID NO: 20738 - DNA, 19 bp, Artificial Sequence
  Target B2M Sequence complement
gtctcgctccgtggcctta

SEQ ID NO: 20739 - DNA, 19 bp, Artificial Sequence
  Target B2M Sequence complement
tctcgctccgtggccttag

SEQ ID NO: 20740 - DNA, 19 bp, Artificial Sequence
  Target B2M Sequence complement
ctcgctccgtggccttagc

SEQ ID NO: 20741 - DNA, 19 bp, Artificial Sequence
  Target B2M Sequence complement
tcgctccgtggccttagct

SEQ ID NO: 20742 - DNA, 19 bp, Artificial Sequence
  Target B2M Sequence complement
cgctccgtggccttagctg

SEQ ID NO: 20743 - DNA, 19 bp, Artificial Sequence
  Target B2M Sequence complement
gctccgtggccttagctgt

SEQ ID NO: 20744 - DNA, 19 bp, Artificial Sequence
  Target B2M Sequence complement
ctccgtggccttagctgtg

SEQ ID NO: 20745 - DNA, 19 bp, Artificial Sequence
  Target B2M Sequence complement
tccgtggccttagctgtgc

SEQ ID NO: 20746 - DNA, 19 bp, Artificial Sequence
  Target B2M Sequence complement
ccgtggccttagctgtgct

SEQ ID NO: 20747 - DNA, 19 bp, Artificial Sequence
  Target B2M Sequence complement
cgtggccttagctgtgctc

SEQ ID NO: 20748 - DNA, 19 bp, Artificial Sequence
  Target B2M Sequence complement
gtggccttagctgtgctcg

SEQ ID NO: 20749 - DNA, 19 bp, Artificial Sequence
  Target B2M Sequence complement
tggccttagctgtgctcgc

SEQ ID NO: 20750 - DNA, 19 bp, Artificial Sequence
  Target B2M Sequence complement
ggccttagctgtgctcgcg

SEQ ID NO: 20751 - DNA, 19 bp, Artificial Sequence
  Target B2M Sequence complement
gccttagctgtgctcgcgc

SEQ ID NO: 20752 - DNA, 19 bp, Artificial Sequence
  Target B2M Sequence complement
ccttagctgtgctcgcgct

SEQ ID NO: 20753 - DNA, 19 bp, Artificial Sequence
  Target B2M Sequence complement
agctgtgctcgcgctactc

SEQ ID NO: 20754 - DNA, 19 bp, Artificial Sequence
  Target B2M Sequence complement
gctgtgctcgcgctactct

SEQ ID NO: 20755 - DNA, 19 bp, Artificial Sequence
  Target B2M Sequence complement
ctgtgctcgcgctactctc

SEQ ID NO: 20756 - DNA, 19 bp, Artificial Sequence
  Target B2M Sequence complement
gtgctcgcgctactctctc

SEQ ID NO: 20757 - DNA, 19 bp, Artificial Sequence
  Target B2M Sequence complement
ctctttctggcctggaggc

SEQ ID NO: 20758 - DNA, 19 bp, Artificial Sequence
  Target B2M Sequence complement
tctggcctggaggctatcc

SEQ ID NO: 20759 - DNA, 19 bp, Artificial Sequence
  Target B2M Sequence complement
ctggcctggaggctatcca

SEQ ID NO: 20760 - DNA, 19 bp, Artificial Sequence
  Target B2M Sequence complement
tggcctggaggctatccag

SEQ ID NO: 20761 - DNA, 19 bp, Artificial Sequence
  Target B2M Sequence complement
ggcctggaggctatccagc

SEQ ID NO: 20762 - DNA, 19 bp, Artificial Sequence
  Target B2M Sequence complement
gcctggaggctatccagcg

SEQ ID NO: 20763 - DNA, 19 bp, Artificial Sequence
  Target B2M Sequence complement
cctggaggctatccagcgt

SEQ ID NO: 20764 - DNA, 19 bp, Artificial Sequence
  Target B2M Sequence complement
gcctgccgtgtgaaccatg

SEQ ID NO: 20765 - DNA, 19 bp, Artificial Sequence
  Target B2M Sequence complement
ttgcttgctttttaatatt

SEQ ID NO: 20766 - DNA, 19 bp, Artificial Sequence
  Target B2M Sequence complement
cttgctttttaatattgat

SEQ ID NO: 20767 - DNA, 19 bp, Artificial Sequence
  Target B2M Sequence complement
ttgctttttaatattgata

SEQ ID NO: 20768 - DNA, 19 bp, Artificial Sequence
  Target B2M Sequence complement
tgctttttaatattgatat

SEQ ID NO: 20769 - DNA, 19 bp, Artificial Sequence
  Target B2M Sequence complement
gctttttaatattgatatg

SEQ ID NO: 20770 - DNA, 19 bp, Artificial Sequence
  Target B2M Sequence complement
ctttttaatattgatatgc

SEQ ID NO: 20771 - DNA, 19 bp, Artificial Sequence
  Target B2M Sequence complement
tttttaatattgatatgct

SEQ ID NO: 20772 - DNA, 19 bp, Artificial Sequence
  Target B2M Sequence complement
ttttaatattgatatgctt

SEQ ID NO: 20773 - DNA, 19 bp, Artificial Sequence
  Target B2M Sequence complement
tttaatattgatatgctta

SEQ ID NO: 20774 - DNA, 19 bp, Artificial Sequence
  Target B2M Sequence complement
ttaatattgatatgcttat

SEQ ID NO: 20775 - DNA, 19 bp, Artificial Sequence
  Target B2M Sequence complement
taatattgatatgcttata

SEQ ID NO: 20776 - DNA, 19 bp, Artificial Sequence
  Target B2M Sequence complement
aatattgatatgcttatac

SEQ ID NO: 20777 - DNA, 19 bp, Artificial Sequence
  Target B2M Sequence complement
atattgatatgcttataca

SEQ ID NO: 20778 - DNA, 19 bp, Artificial Sequence
  Target B2M Sequence complement
ttatacacttacactttat

SEQ ID NO: 20779 - DNA, 19 bp, Artificial Sequence
  Target B2M Sequence complement
aaaatgtagggttataata

SEQ ID NO: 20780 - DNA, 19 bp, Artificial Sequence
  Target B2M Sequence complement
aaatgtagggttataataa

SEQ ID NO: 20781 - DNA, 19 bp, Artificial Sequence
  Target B2M Sequence complement
aatgtagggttataataat

SEQ ID NO: 20782 - DNA, 19 bp, Artificial Sequence
  Target B2M Sequence complement
tagggttataataatgtta

SEQ ID NO: 20783 - DNA, 19 bp, Artificial Sequence
  Target B2M Sequence complement
agggttataataatgttaa

SEQ ID NO: 20784 - DNA, 19 bp, Artificial Sequence
  Target B2M Sequence complement
ggttataataatgttaaca

SEQ ID NO: 20785 - DNA, 19 bp, Artificial Sequence
  Target B2M Sequence complement
gttataataatgttaacat

SEQ ID NO: 20786 - DNA, 19 bp, Artificial Sequence
  Target B2M Sequence complement
ttataataatgttaacatg

SEQ ID NO: 20787 - DNA, 19 bp, Artificial Sequence
  Target B2M Sequence complement
tataataatgttaacatgg

SEQ ID NO: 20788 - DNA, 19 bp, Artificial Sequence
  Target B2M Sequence complement
ataataatgttaacatgga

SEQ ID NO: 20789 - DNA, 19 bp, Artificial Sequence
  Target B2M Sequence complement
acatgatcttctttataat

SEQ ID NO: 20790 - DNA, 19 bp, Artificial Sequence
  Target B2M Sequence complement
catgatcttctttataatt

SEQ ID NO: 20791 - DNA, 19 bp, Artificial Sequence
  Target B2M Sequence complement
atgatcttctttataattc

SEQ ID NO: 20792 - DNA, 19 bp, Artificial Sequence
  Target B2M Sequence complement
tgatcttctttataattct

SEQ ID NO: 20793 - DNA, 19 bp, Artificial Sequence
  Target B2M Sequence complement
gatcttctttataattcta

SEQ ID NO: 20794 - DNA, 19 bp, Artificial Sequence
  Target B2M Sequence complement
atcttctttataattctac

SEQ ID NO: 20795 - DNA, 19 bp, Artificial Sequence
  Target B2M Sequence complement
tcttctttataattctact

SEQ ID NO: 20796 - DNA, 19 bp, Artificial Sequence
  Target B2M Sequence complement
cttctttataattctactt

SEQ ID NO: 20797 - DNA, 19 bp, Artificial Sequence
  Target B2M Sequence complement
ttctttataattctacttt

SEQ ID NO: 20798 - DNA, 19 bp, Artificial Sequence
  Target B2M Sequence complement
tctttataattctactttg

SEQ ID NO: 20799 - DNA, 19 bp, Artificial Sequence
  Target B2M Sequence complement
ctttataattctactttga

SEQ ID NO: 20800 - DNA, 19 bp, Artificial Sequence
  Target B2M Sequence complement
tttataattctactttgag

SEQ ID NO: 20801 - DNA, 19 bp, Artificial Sequence
  Target B2M Sequence complement
ttataattctactttgagt

SEQ ID NO: 20802 - DNA, 19 bp, Artificial Sequence
  Target B2M Sequence complement
gagcaggttgctccacagg

SEQ ID NO: 20803 - DNA, 19 bp, Artificial Sequence
  Target B2M Sequence complement
caggtagctctaggagggc

SEQ ID NO: 20804 - DNA, 19 bp, Artificial Sequence
  Target B2M Sequence complement
ggtagctctaggagggctg

SEQ ID NO: 20805 - DNA, 19 bp, Artificial Sequence
  Target B2M Sequence complement
gtagctctaggagggctgg

SEQ ID NO: 20806 - DNA, 19 bp, Artificial Sequence
  Target B2M Sequence complement
tagctctaggagggctggc

SEQ ID NO: 20807 - DNA, 19 bp, Artificial Sequence
  Target B2M Sequence complement
agctctaggagggctggca

SEQ ID NO: 20808 - DNA, 19 bp, Artificial Sequence
  Target B2M Sequence complement
gctctaggagggctggcaa

SEQ ID NO: 20809 - DNA, 19 bp, Artificial Sequence
  Target B2M Sequence complement
ctctaggagggctggcaac

SEQ ID NO: 20810 - DNA, 19 bp, Artificial Sequence
  Target B2M Sequence complement
ataagttaacttccaattt

SEQ ID NO: 20811 - DNA, 19 bp, Artificial Sequence
  Target B2M Sequence complement
taagttaacttccaattta

SEQ ID NO: 20812 - DNA, 19 bp, Artificial Sequence
  Target B2M Sequence complement
ttaacttccaatttacata

SEQ ID NO: 20813 - DNA, 19 bp, Artificial Sequence
  Target B2M Sequence complement
gggaaaatttagaaatata

SEQ ID NO: 20814 - DNA, 19 bp, Artificial Sequence
  Target B2M Sequence complement
ggaaaatttagaaatataa

SEQ ID NO: 20815 - DNA, 19 bp, Artificial Sequence
  Target B2M Sequence complement
gaaaatttagaaatataat

SEQ ID NO: 20816 - DNA, 19 bp, Artificial Sequence
  Target B2M Sequence complement
aaaatttagaaatataatt

SEQ ID NO: 20817 - DNA, 19 bp, Artificial Sequence
  Target B2M Sequence complement
aaatttagaaatataattg

SEQ ID NO: 20818 - DNA, 19 bp, Artificial Sequence
  Target B2M Sequence complement
aatttagaaatataattga

SEQ ID NO: 20819 - DNA, 19 bp, Artificial Sequence
  Target B2M Sequence complement
atttagaaatataattgac

SEQ ID NO: 20820 - DNA, 19 bp, Artificial Sequence
  Target B2M Sequence complement
tttagaaatataattgaca

SEQ ID NO: 20821 - DNA, 19 bp, Artificial Sequence
  Target B2M Sequence complement
ttagaaatataattgacag

SEQ ID NO: 20822 - DNA, 19 bp, Artificial Sequence
  Target B2M Sequence complement
aaatataattgacaggatt

SEQ ID NO: 20823 - DNA, 19 bp, Artificial Sequence
  Target B2M Sequence complement
aatataattgacaggatta

SEQ ID NO: 20824 - DNA, 19 bp, Artificial Sequence
  Target B2M Sequence complement
atataattgacaggattat

SEQ ID NO: 20825 - DNA, 19 bp, Artificial Sequence
  Target B2M Sequence complement
tataattgacaggattatt

SEQ ID NO: 20826 - DNA, 19 bp, Artificial Sequence
  Target B2M Sequence complement
gattattggaaatttgtta

SEQ ID NO: 20827 - DNA, 19 bp, Artificial Sequence
  Target B2M Sequence complement
attattggaaatttgttat

SEQ ID NO: 20828 - DNA, 19 bp, Artificial Sequence
  Target B2M Sequence complement
ttattggaaatttgttata

SEQ ID NO: 20829 - DNA, 19 bp, Artificial Sequence
  Target B2M Sequence complement
tattggaaatttgttataa

SEQ ID NO: 20830 - DNA, 19 bp, Artificial Sequence
  Target B2M Sequence complement
attggaaatttgttataat

SEQ ID NO: 20831 - DNA, 19 bp, Artificial Sequence
  Target B2M Sequence complement
ttggaaatttgttataatg

SEQ ID NO: 20832 - DNA, 19 bp, Artificial Sequence
  Target B2M Sequence complement
tggaaatttgttataatga

SEQ ID NO: 20833 - DNA, 19 bp, Artificial Sequence
  Target B2M Sequence complement
ggaaatttgttataatgaa

SEQ ID NO: 20834 - DNA, 19 bp, Artificial Sequence
  Target B2M Sequence complement
gaaatttgttataatgaat

SEQ ID NO: 20835 - DNA, 19 bp, Artificial Sequence
  Target B2M Sequence complement
aaatttgttataatgaatg

SEQ ID NO: 20836 - DNA, 19 bp, Artificial Sequence
  Target B2M Sequence complement
aatttgttataatgaatga

SEQ ID NO: 20837 - DNA, 19 bp, Artificial Sequence
  Target B2M Sequence complement
atttgttataatgaatgaa

SEQ ID NO: 20838 - DNA, 19 bp, Artificial Sequence
  Target B2M Sequence complement
tttgttataatgaatgaaa

SEQ ID NO: 20839 - DNA, 19 bp, Artificial Sequence
  Target B2M Sequence complement
ttgttataatgaatgaaac

SEQ ID NO: 20840 - DNA, 19 bp, Artificial Sequence
  Target B2M Sequence complement
tgttataatgaatgaaaca

SEQ ID NO: 20841 - DNA, 19 bp, Artificial Sequence
  Target B2M Sequence complement
gttataatgaatgaaacat

SEQ ID NO: 20842 - DNA, 19 bp, Artificial Sequence
  Target B2M Sequence complement
ttataatgaatgaaacatt

SEQ ID NO: 20843 - DNA, 19 bp, Artificial Sequence
  Target B2M Sequence complement
tataatgaatgaaacattt

SEQ ID NO: 20844 - DNA, 19 bp, Artificial Sequence
  Target B2M Sequence complement
ataatgaatgaaacatttt

SEQ ID NO: 20845 - DNA, 19 bp, Artificial Sequence
  Target B2M Sequence complement
taatgaatgaaacattttg

SEQ ID NO: 20846 - DNA, 19 bp, Artificial Sequence
  Target B2M Sequence complement
aatgaatgaaacattttgt

SEQ ID NO: 20847 - DNA, 19 bp, Artificial Sequence
  Target B2M Sequence complement
aatgaaacattttgtcata

SEQ ID NO: 20848 - DNA, 19 bp, Artificial Sequence
  Target B2M Sequence complement
atgaaacattttgtcatat

SEQ ID NO: 20849 - DNA, 19 bp, Artificial Sequence
  Target B2M Sequence complement
tgaaacattttgtcatata

SEQ ID NO: 20850 - DNA, 19 bp, Artificial Sequence
  Target B2M Sequence complement
gaaacattttgtcatataa

SEQ ID NO: 20851 - DNA, 19 bp, Artificial Sequence
  Target B2M Sequence complement
aaacattttgtcatataag

SEQ ID NO: 20852 - DNA, 19 bp, Artificial Sequence
  Target B2M Sequence complement
aacattttgtcatataaga

SEQ ID NO: 20853 - DNA, 19 bp, Artificial Sequence
  Target B2M Sequence complement
acattttgtcatataagat

SEQ ID NO: 20854 - DNA, 19 bp, Artificial Sequence
  Target B2M Sequence complement
cattttgtcatataagatt

SEQ ID NO: 20855 - DNA, 19 bp, Artificial Sequence
  Target B2M Sequence complement
attttgtcatataagattc

SEQ ID NO: 20856 - DNA, 19 bp, Artificial Sequence
  Target B2M Sequence complement
ttttgtcatataagattca

SEQ ID NO: 20857 - DNA, 19 bp, Artificial Sequence
  Target B2M Sequence complement
tttgtcatataagattcat

SEQ ID NO: 20858 - DNA, 19 bp, Artificial Sequence
  Target B2M Sequence complement
ttgtcatataagattcata

SEQ ID NO: 20859 - DNA, 19 bp, Artificial Sequence
  Target B2M Sequence complement
tgtcatataagattcatat

SEQ ID NO: 20860 - DNA, 19 bp, Artificial Sequence
  Target B2M Sequence complement
gtcatataagattcatatt

SEQ ID NO: 20861 - DNA, 19 bp, Artificial Sequence
  Target B2M Sequence complement
tcatataagattcatattt

SEQ ID NO: 20862 - DNA, 19 bp, Artificial Sequence
  Target B2M Sequence complement
catataagattcatattta

SEQ ID NO: 20863 - DNA, 19 bp, Artificial Sequence
  Target B2M Sequence complement
atataagattcatatttac

SEQ ID NO: 20864 - DNA, 19 bp, Artificial Sequence
  Target B2M Sequence complement
tataagattcatatttact

SEQ ID NO: 20865 - DNA, 19 bp, Artificial Sequence
  Target B2M Sequence complement
ataagattcatatttactt

SEQ ID NO: 20866 - DNA, 19 bp, Artificial Sequence
  Target B2M Sequence complement
taagattcatatttacttc

SEQ ID NO: 20867 - DNA, 19 bp, Artificial Sequence
  Target B2M Sequence complement
aagattcatatttacttct

SEQ ID NO: 20868 - DNA, 19 bp, Artificial Sequence
  Target B2M Sequence complement
agattcatatttacttctt

SEQ ID NO: 20869 - DNA, 19 bp, Artificial Sequence
  Target B2M Sequence complement
gattcatatttacttctta

SEQ ID NO: 20870 - DNA, 19 bp, Artificial Sequence
  Target B2M Sequence complement
attcatatttacttcttat

SEQ ID NO: 20871 - DNA, 19 bp, Artificial Sequence
  Target B2M Sequence complement
ttcatatttacttcttata

SEQ ID NO: 20872 - DNA, 19 bp, Artificial Sequence
  Target B2M Sequence complement
tcatatttacttcttatac

SEQ ID NO: 20873 - DNA, 19 bp, Artificial Sequence
  Target B2M Sequence complement
catatttacttcttataca

SEQ ID NO: 20874 - DNA, 19 bp, Artificial Sequence
  Target B2M Sequence complement
atatttacttcttatacat

SEQ ID NO: 20875 - DNA, 19 bp, Artificial Sequence
  Target B2M Sequence complement
tatttacttcttatacatt

SEQ ID NO: 20876 - DNA, 19 bp, Artificial Sequence
  Target B2M Sequence complement
atttacttcttatacattt

SEQ ID NO: 20877 - DNA, 19 bp, Artificial Sequence
  Target B2M Sequence complement
tttacttcttatacatttg

SEQ ID NO: 20878 - DNA, 19 bp, Artificial Sequence
  Target B2M Sequence complement
ttacttcttatacatttga

SEQ ID NO: 20879 - DNA, 19 bp, Artificial Sequence
  Target B2M Sequence complement
tacttcttatacatttgat

SEQ ID NO: 20880 - DNA, 19 bp, Artificial Sequence
  Target B2M Sequence complement
acttcttatacatttgata

SEQ ID NO: 20881 - DNA, 19 bp, Artificial Sequence
  Target B2M Sequence complement
cttcttatacatttgataa

SEQ ID NO: 20882 - DNA, 19 bp, Artificial Sequence
  Target B2M Sequence complement
ttcttatacatttgataaa

SEQ ID NO: 20883 - DNA, 19 bp, Artificial Sequence
  Target B2M Sequence complement
tcttatacatttgataaag

SEQ ID NO: 20884 - DNA, 19 bp, Artificial Sequence
  Target B2M Sequence complement
cttatacatttgataaagt

SEQ ID NO: 20885 - DNA, 19 bp, Artificial Sequence
  Target B2M Sequence complement
ttatacatttgataaagta

SEQ ID NO: 20886 - DNA, 19 bp, Artificial Sequence
  Target B2M Sequence complement
tatacatttgataaagtaa

SEQ ID NO: 20887 - DNA, 19 bp, Artificial Sequence
  Target B2M Sequence complement
atacatttgataaagtaag

SEQ ID NO: 20888 - DNA, 19 bp, Artificial Sequence
  Target B2M Sequence complement
gttaatctggtttattttt

SEQ ID NO: 20889 - DNA, 19 bp, Artificial Sequence
  Target B2M Sequence complement
ttaatctggtttatttttg

SEQ ID NO: 20890 - DNA, 19 bp, Artificial Sequence
  Target B2M Sequence complement
taatctggtttatttttgt

SEQ ID NO: 20891 - DNA, 19 bp, Artificial Sequence
  Target B2M Sequence complement
aatctggtttatttttgtt

SEQ ID NO: 20892 - DNA, 19 bp, Artificial Sequence
  Target B2M Sequence complement
ttccacaagttaaataaat

SEQ ID NO: 20893 - DNA, 19 bp, Artificial Sequence
  Target B2M Sequence complement
cacaagttaaataaatcat

SEQ ID NO: 20894 - DNA, 19 bp, Artificial Sequence
  Target B2M Sequence complement
acaagttaaataaatcata

SEQ ID NO: 20895 - DNA, 19 bp, Artificial Sequence
  Target B2M Sequence complement
caagttaaataaatcataa

SEQ ID NO: 20896 - DNA, 19 bp, Artificial Sequence
  Target B2M Sequence complement
aagttaaataaatcataaa

SEQ ID NO: 20897 - DNA, 19 bp, Artificial Sequence
  Target B2M Sequence complement
agttaaataaatcataaaa

SEQ ID NO: 20898 - DNA, 19 bp, Artificial Sequence
  Target B2M Sequence complement
gttaaataaatcataaaac

SEQ ID NO: 20899 - DNA, 19 bp, Artificial Sequence
  Target B2M Sequence complement
ttaaataaatcataaaact

SEQ ID NO: 20900 - DNA, 19 bp, Artificial Sequence
  Target B2M Sequence complement
taaataaatcataaaactt

SEQ ID NO: 20901 - DNA, 19 bp, Artificial Sequence
  Target B2M Sequence complement
aaataaatcataaaacttg

SEQ ID NO: 20902 - DNA, 19 bp, Artificial Sequence
  Target B2M Sequence complement
aataaatcataaaacttga

SEQ ID NO: 20903 - DNA, 20 bp, Artificial Sequence
  Target B2M Sequence complement
gaagctgacagcattcgggc

SEQ ID NO: 20904 - DNA, 20 bp, Artificial Sequence
  Target B2M Sequence complement
aagctgacagcattcgggcc

SEQ ID NO: 20905 - DNA, 20 bp, Artificial Sequence
  Target B2M Sequence complement
agctgacagcattcgggccg

SEQ ID NO: 20906 - DNA, 20 bp, Artificial Sequence
  Target B2M Sequence complement
gctgacagcattcgggccga

SEQ ID NO: 20907 - DNA, 20 bp, Artificial Sequence
  Target B2M Sequence complement
ctgacagcattcgggccgag

SEQ ID NO: 20908 - DNA, 20 bp, Artificial Sequence
  Target B2M Sequence complement
tgacagcattcgggccgaga

SEQ ID NO: 20909 - DNA, 20 bp, Artificial Sequence
  Target B2M Sequence complement
gacagcattcgggccgagat

SEQ ID NO: 20910 - DNA, 20 bp, Artificial Sequence
  Target B2M Sequence complement
acagcattcgggccgagatg

SEQ ID NO: 20911 - DNA, 20 bp, Artificial Sequence
  Target B2M Sequence complement
cagcattcgggccgagatgt

SEQ ID NO: 20912 - DNA, 20 bp, Artificial Sequence
  Target B2M Sequence complement
agcattcgggccgagatgtc

SEQ ID NO: 20913 - DNA, 20 bp, Artificial Sequence
  Target B2M Sequence complement
gcattcgggccgagatgtct

SEQ ID NO: 20914 - DNA, 20 bp, Artificial Sequence
  Target B2M Sequence complement
cattcgggccgagatgtctc

SEQ ID NO: 20915 - DNA, 20 bp, Artificial Sequence
  Target B2M Sequence complement
attcgggccgagatgtctcg

SEQ ID NO: 20916 - DNA, 20 bp, Artificial Sequence
  Target B2M Sequence complement
ttcgggccgagatgtctcgc

SEQ ID NO: 20917 - DNA, 20 bp, Artificial Sequence
  Target B2M Sequence complement
tcgggccgagatgtctcgct

SEQ ID NO: 20918 - DNA, 20 bp, Artificial Sequence
  Target B2M Sequence complement
cgggccgagatgtctcgctc

SEQ ID NO: 20919 - DNA, 20 bp, Artificial Sequence
  Target B2M Sequence complement
gggccgagatgtctcgctcc

SEQ ID NO: 20920 - DNA, 20 bp, Artificial Sequence
  Target B2M Sequence complement
ggccgagatgtctcgctccg

SEQ ID NO: 20921 - DNA, 20 bp, Artificial Sequence
  Target B2M Sequence complement
gccgagatgtctcgctccgt

SEQ ID NO: 20922 - DNA, 20 bp, Artificial Sequence
  Target B2M Sequence complement
ccgagatgtctcgctccgtg

SEQ ID NO: 20923 - DNA, 20 bp, Artificial Sequence
  Target B2M Sequence complement
cgagatgtctcgctccgtgg

SEQ ID NO: 20924 - DNA, 20 bp, Artificial Sequence
  Target B2M Sequence complement
gagatgtctcgctccgtggc

SEQ ID NO: 20925 - DNA, 20 bp, Artificial Sequence
  Target B2M Sequence complement
agatgtctcgctccgtggcc

SEQ ID NO: 20926 - DNA, 20 bp, Artificial Sequence
  Target B2M Sequence complement
gatgtctcgctccgtggcct

SEQ ID NO: 20927 - DNA, 20 bp, Artificial Sequence
  Target B2M Sequence complement
atgtctcgctccgtggcctt

SEQ ID NO: 20928 - DNA, 20 bp, Artificial Sequence
  Target B2M Sequence complement
tgtctcgctccgtggcctta

SEQ ID NO: 20929 - DNA, 20 bp, Artificial Sequence
  Target B2M Sequence complement
gtctcgctccgtggccttag

SEQ ID NO: 20930 - DNA, 20 bp, Artificial Sequence
  Target B2M Sequence complement
tctcgctccgtggccttagc

SEQ ID NO: 20931 - DNA, 20 bp, Artificial Sequence
  Target B2M Sequence complement
ctcgctccgtggccttagct

SEQ ID NO: 20932 - DNA, 20 bp, Artificial Sequence
  Target B2M Sequence complement
tcgctccgtggccttagctg

SEQ ID NO: 20933 - DNA, 20 bp, Artificial Sequence
  Target B2M Sequence complement
cgctccgtggccttagctgt

SEQ ID NO: 20934 - DNA, 20 bp, Artificial Sequence
  Target B2M Sequence complement
gctccgtggccttagctgtg

SEQ ID NO: 20935 - DNA, 20 bp, Artificial Sequence
  Target B2M Sequence complement
ctccgtggccttagctgtgc

SEQ ID NO: 20936 - DNA, 20 bp, Artificial Sequence
  Target B2M Sequence complement
tccgtggccttagctgtgct

SEQ ID NO: 20937 - DNA, 20 bp, Artificial Sequence
  Target B2M Sequence complement
ccgtggccttagctgtgctc

SEQ ID NO: 20938 - DNA, 20 bp, Artificial Sequence
  Target B2M Sequence complement
cgtggccttagctgtgctcg

SEQ ID NO: 20939 - DNA, 20 bp, Artificial Sequence
  Target B2M Sequence complement
gtggccttagctgtgctcgc

SEQ ID NO: 20940 - DNA, 20 bp, Artificial Sequence
  Target B2M Sequence complement
tggccttagctgtgctcgcg

SEQ ID NO: 20941 - DNA, 20 bp, Artificial Sequence
  Target B2M Sequence complement
ggccttagctgtgctcgcgc

SEQ ID NO: 20942 - DNA, 20 bp, Artificial Sequence
  Target B2M Sequence complement
gccttagctgtgctcgcgct

SEQ ID NO: 20943 - DNA, 20 bp, Artificial Sequence
  Target B2M Sequence complement
ccttagctgtgctcgcgcta

SEQ ID NO: 20944 - DNA, 20 bp, Artificial Sequence
  Target B2M Sequence complement
cttagctgtgctcgcgctac

SEQ ID NO: 20945 - DNA, 20 bp, Artificial Sequence
  Target B2M Sequence complement
tagctgtgctcgcgctactc

SEQ ID NO: 20946 - DNA, 20 bp, Artificial Sequence
  Target B2M Sequence complement
agctgtgctcgcgctactct

SEQ ID NO: 20947 - DNA, 20 bp, Artificial Sequence
  Target B2M Sequence complement
gctgtgctcgcgctactctc

SEQ ID NO: 20948 - DNA, 20 bp, Artificial Sequence
  Target B2M Sequence complement
ctgtgctcgcgctactctct

SEQ ID NO: 20949 - DNA, 20 bp, Artificial Sequence
  Target B2M Sequence complement
tgtgctcgcgctactctctc

SEQ ID NO: 20950 - DNA, 20 bp, Artificial Sequence
  Target B2M Sequence complement
gtgctcgcgctactctctct

SEQ ID NO: 20951 - DNA, 20 bp, Artificial Sequence
  Target B2M Sequence complement
ctctctttctggcctggagg

SEQ ID NO: 20952 - DNA, 20 bp, Artificial Sequence
  Target B2M Sequence complement
tctctttctggcctggaggc

SEQ ID NO: 20953 - DNA, 20 bp, Artificial Sequence
  Target B2M Sequence complement
ctctttctggcctggaggct

SEQ ID NO: 20954 - DNA, 20 bp, Artificial Sequence
  Target B2M Sequence complement
ttctggcctggaggctatcc

SEQ ID NO: 20955 - DNA, 20 bp, Artificial Sequence
  Target B2M Sequence complement
tctggcctggaggctatcca

SEQ ID NO: 20956 - DNA, 20 bp, Artificial Sequence
  Target B2M Sequence complement
ctggcctggaggctatccag

SEQ ID NO: 20957 - DNA, 20 bp, Artificial Sequence
  Target B2M Sequence complement
tggcctggaggctatccagc

SEQ ID NO: 20958 - DNA, 20 bp, Artificial Sequence
  Target B2M Sequence complement
ggcctggaggctatccagcg

SEQ ID NO: 20959 - DNA, 20 bp, Artificial Sequence
  Target B2M Sequence complement
gcctggaggctatccagcgt

SEQ ID NO: 20960 - DNA, 20 bp, Artificial Sequence
  Target B2M Sequence complement
cctggaggctatccagcgta

SEQ ID NO: 20961 - DNA, 20 bp, Artificial Sequence
  Target B2M Sequence complement
ctggaggctatccagcgtac

SEQ ID NO: 20962 - DNA, 20 bp, Artificial Sequence
  Target B2M Sequence complement
ggaggctatccagcgtactc

SEQ ID NO: 20963 - DNA, 20 bp, Artificial Sequence
  Target B2M Sequence complement
gaggctatccagcgtactcc

SEQ ID NO: 20964 - DNA, 20 bp, Artificial Sequence
  Target B2M Sequence complement
gtatgcctgccgtgtgaacc

SEQ ID NO: 20965 - DNA, 20 bp, Artificial Sequence
  Target B2M Sequence complement
tgcctgccgtgtgaaccatg

SEQ ID NO: 20966 - DNA, 20 bp, Artificial Sequence
  Target B2M Sequence complement
gcctgccgtgtgaaccatgt

SEQ ID NO: 20967 - DNA, 20 bp, Artificial Sequence
  Target B2M Sequence complement
cctgccgtgtgaaccatgtg

SEQ ID NO: 20968 - DNA, 20 bp, Artificial Sequence
  Target B2M Sequence complement
cttgctttttaatattgata

SEQ ID NO: 20969 - DNA, 20 bp, Artificial Sequence
  Target B2M Sequence complement
ttgctttttaatattgatat

SEQ ID NO: 20970 - DNA, 20 bp, Artificial Sequence
  Target B2M Sequence complement
tgctttttaatattgatatg

SEQ ID NO: 20971 - DNA, 20 bp, Artificial Sequence
  Target B2M Sequence complement
ctttttaatattgatatgct

SEQ ID NO: 20972 - DNA, 20 bp, Artificial Sequence
  Target B2M Sequence complement
tttttaatattgatatgctt

SEQ ID NO: 20973 - DNA, 20 bp, Artificial Sequence
  Target B2M Sequence complement
ttttaatattgatatgctta

SEQ ID NO: 20974 - DNA, 20 bp, Artificial Sequence
  Target B2M Sequence complement
tttaatattgatatgcttat

SEQ ID NO: 20975 - DNA, 20 bp, Artificial Sequence
  Target B2M Sequence complement
ttaatattgatatgcttata

SEQ ID NO: 20976 - DNA, 20 bp, Artificial Sequence
  Target B2M Sequence complement
taatattgatatgcttatac

SEQ ID NO: 20977 - DNA, 20 bp, Artificial Sequence
  Target B2M Sequence complement
aatattgatatgcttataca

SEQ ID NO: 20978 - DNA, 20 bp, Artificial Sequence
  Target B2M Sequence complement
aaaatgtagggttataataa

SEQ ID NO: 20979 - DNA, 20 bp, Artificial Sequence
  Target B2M Sequence complement
aaatgtagggttataataat

SEQ ID NO: 20980 - DNA, 20 bp, Artificial Sequence
  Target B2M Sequence complement
tagggttataataatgttaa

SEQ ID NO: 20981 - DNA, 20 bp, Artificial Sequence
  Target B2M Sequence complement
ggttataataatgttaacat

SEQ ID NO: 20982 - DNA, 20 bp, Artificial Sequence
  Target B2M Sequence complement
gttataataatgttaacatg

SEQ ID NO: 20983 - DNA, 20 bp, Artificial Sequence
  Target B2M Sequence complement
ttataataatgttaacatgg

SEQ ID NO: 20984 - DNA, 20 bp, Artificial Sequence
  Target B2M Sequence complement
tataataatgttaacatgga

SEQ ID NO: 20985 - DNA, 20 bp, Artificial Sequence
  Target B2M Sequence complement
acatgatcttctttataatt

SEQ ID NO: 20986 - DNA, 20 bp, Artificial Sequence
  Target B2M Sequence complement
atgatcttctttataattct

SEQ ID NO: 20987 - DNA, 20 bp, Artificial Sequence
  Target B2M Sequence complement
tgatcttctttataattcta

SEQ ID NO: 20988 - DNA, 20 bp, Artificial Sequence
  Target B2M Sequence complement
atcttctttataattctact

SEQ ID NO: 20989 - DNA, 20 bp, Artificial Sequence
  Target B2M Sequence complement
tcttctttataattctactt

SEQ ID NO: 20990 - DNA, 20 bp, Artificial Sequence
  Target B2M Sequence complement
cttctttataattctacttt

SEQ ID NO: 20991 - DNA, 20 bp, Artificial Sequence
  Target B2M Sequence complement
ttctttataattctactttg

SEQ ID NO: 20992 - DNA, 20 bp, Artificial Sequence
  Target B2M Sequence complement
tctttataattctactttga

SEQ ID NO: 20993 - DNA, 20 bp, Artificial Sequence
  Target B2M Sequence complement
tttataattctactttgagt

SEQ ID NO: 20994 - DNA, 20 bp, Artificial Sequence
  Target B2M Sequence complement
ctgagcaggttgctccacag

SEQ ID NO: 20995 - DNA, 20 bp, Artificial Sequence
  Target B2M Sequence complement
tgagcaggttgctccacagg

SEQ ID NO: 20996 - DNA, 20 bp, Artificial Sequence
  Target B2M Sequence complement
gagcaggttgctccacaggt

SEQ ID NO: 20997 - DNA, 20 bp, Artificial Sequence
  Target B2M Sequence complement
gcaggttgctccacaggtag

SEQ ID NO: 20998 - DNA, 20 bp, Artificial Sequence
  Target B2M Sequence complement
caggttgctccacaggtagc

SEQ ID NO: 20999 - DNA, 20 bp, Artificial Sequence
  Target B2M Sequence complement
ggttgctccacaggtagctc

SEQ ID NO: 21000 - DNA, 20 bp, Artificial Sequence
  Target B2M Sequence complement
gctccacaggtagctctagg

SEQ ID NO: 21001 - DNA, 20 bp, Artificial Sequence
  Target B2M Sequence complement
ccacaggtagctctaggagg

SEQ ID NO: 21002 - DNA, 20 bp, Artificial Sequence
  Target B2M Sequence complement
cacaggtagctctaggaggg

SEQ ID NO: 21003 - DNA, 20 bp, Artificial Sequence
  Target B2M Sequence complement
acaggtagctctaggagggc

SEQ ID NO: 21004 - DNA, 20 bp, Artificial Sequence
  Target B2M Sequence complement
caggtagctctaggagggct

SEQ ID NO: 21005 - DNA, 20 bp, Artificial Sequence
  Target B2M Sequence complement
aggtagctctaggagggctg

SEQ ID NO: 21006 - DNA, 20 bp, Artificial Sequence
  Target B2M Sequence complement
ggtagctctaggagggctgg

SEQ ID NO: 21007 - DNA, 20 bp, Artificial Sequence
  Target B2M Sequence complement
gtagctctaggagggctggc

SEQ ID NO: 21008 - DNA, 20 bp, Artificial Sequence
  Target B2M Sequence complement
tagctctaggagggctggca

SEQ ID NO: 21009 - DNA, 20 bp, Artificial Sequence
  Target B2M Sequence complement
agctctaggagggctggcaa

SEQ ID NO: 21010 - DNA, 20 bp, Artificial Sequence
  Target B2M Sequence complement
gctctaggagggctggcaac

SEQ ID NO: 21011 - DNA, 20 bp, Artificial Sequence
  Target B2M Sequence complement
ctctaggagggctggcaact

SEQ ID NO: 21012 - DNA, 20 bp, Artificial Sequence
  Target B2M Sequence complement
ggagggctggcaacttagag

SEQ ID NO: 21013 - DNA, 20 bp, Artificial Sequence
  Target B2M Sequence complement
gagggctggcaacttagagg

SEQ ID NO: 21014 - DNA, 20 bp, Artificial Sequence
  Target B2M Sequence complement
gggctggcaacttagaggtg

SEQ ID NO: 21015 - DNA, 20 bp, Artificial Sequence
  Target B2M Sequence complement
ggctggcaacttagaggtgg

SEQ ID NO: 21016 - DNA, 20 bp, Artificial Sequence
  Target B2M Sequence complement
gctggcaacttagaggtggg

SEQ ID NO: 21017 - DNA, 20 bp, Artificial Sequence
  Target B2M Sequence complement
ctggcaacttagaggtgggg

SEQ ID NO: 21018 - DNA, 20 bp, Artificial Sequence
  Target B2M Sequence complement
ggcaacttagaggtggggag

SEQ ID NO: 21019 - DNA, 20 bp, Artificial Sequence
  Target B2M Sequence complement
gcaacttagaggtggggagc

SEQ ID NO: 21020 - DNA, 20 bp, Artificial Sequence
  Target B2M Sequence complement
cttagaggtggggagcagag

SEQ ID NO: 21021 - DNA, 20 bp, Artificial Sequence
  Target B2M Sequence complement
ataagttaacttccaattta

SEQ ID NO: 21022 - DNA, 20 bp, Artificial Sequence
  Target B2M Sequence complement
gggaaaatttagaaatataa

SEQ ID NO: 21023 - DNA, 20 bp, Artificial Sequence
  Target B2M Sequence complement
ggaaaatttagaaatataat

SEQ ID NO: 21024 - DNA, 20 bp, Artificial Sequence
  Target B2M Sequence complement
gaaaatttagaaatataatt

SEQ ID NO: 21025 - DNA, 20 bp, Artificial Sequence
  Target B2M Sequence complement
aaaatttagaaatataattg

SEQ ID NO: 21026 - DNA, 20 bp, Artificial Sequence
  Target B2M Sequence complement
aaatttagaaatataattga

SEQ ID NO: 21027 - DNA, 20 bp, Artificial Sequence
  Target B2M Sequence complement
aatttagaaatataattgac

SEQ ID NO: 21028 - DNA, 20 bp, Artificial Sequence
  Target B2M Sequence complement
atttagaaatataattgaca

SEQ ID NO: 21029 - DNA, 20 bp, Artificial Sequence
  Target B2M Sequence complement
tttagaaatataattgacag

SEQ ID NO: 21030 - DNA, 20 bp, Artificial Sequence
  Target B2M Sequence complement
aaatataattgacaggatta

SEQ ID NO: 21031 - DNA, 20 bp, Artificial Sequence
  Target B2M Sequence complement
aatataattgacaggattat

SEQ ID NO: 21032 - DNA, 20 bp, Artificial Sequence
  Target B2M Sequence complement
atataattgacaggattatt

SEQ ID NO: 21033 - DNA, 20 bp, Artificial Sequence
  Target B2M Sequence complement
gattattggaaatttgttat

SEQ ID NO: 21034 - DNA, 20 bp, Artificial Sequence
  Target B2M Sequence complement
attattggaaatttgttata

SEQ ID NO: 21035 - DNA, 20 bp, Artificial Sequence
  Target B2M Sequence complement
ttattggaaatttgttataa

SEQ ID NO: 21036 - DNA, 20 bp, Artificial Sequence
  Target B2M Sequence complement
tattggaaatttgttataat

SEQ ID NO: 21037 - DNA, 20 bp, Artificial Sequence
  Target B2M Sequence complement
attggaaatttgttataatg

SEQ ID NO: 21038 - DNA, 20 bp, Artificial Sequence
  Target B2M Sequence complement
ttggaaatttgttataatga

SEQ ID NO: 21039 - DNA, 20 bp, Artificial Sequence
  Target B2M Sequence complement
tggaaatttgttataatgaa

SEQ ID NO: 21040 - DNA, 20 bp, Artificial Sequence
  Target B2M Sequence complement
ggaaatttgttataatgaat

SEQ ID NO: 21041 - DNA, 20 bp, Artificial Sequence
  Target B2M Sequence complement
gaaatttgttataatgaatg

SEQ ID NO: 21042 - DNA, 20 bp, Artificial Sequence
  Target B2M Sequence complement
aaatttgttataatgaatga

SEQ ID NO: 21043 - DNA, 20 bp, Artificial Sequence
  Target B2M Sequence complement
aatttgttataatgaatgaa

SEQ ID NO: 21044 - DNA, 20 bp, Artificial Sequence
  Target B2M Sequence complement
atttgttataatgaatgaaa

SEQ ID NO: 21045 - DNA, 20 bp, Artificial Sequence
  Target B2M Sequence complement
tttgttataatgaatgaaac

SEQ ID NO: 21046 - DNA, 20 bp, Artificial Sequence
  Target B2M Sequence complement
ttgttataatgaatgaaaca

SEQ ID NO: 21047 - DNA, 20 bp, Artificial Sequence
  Target B2M Sequence complement
tgttataatgaatgaaacat

SEQ ID NO: 21048 - DNA, 20 bp, Artificial Sequence
  Target B2M Sequence complement
gttataatgaatgaaacatt

SEQ ID NO: 21049 - DNA, 20 bp, Artificial Sequence
  Target B2M Sequence complement
ttataatgaatgaaacattt

SEQ ID NO: 21050 - DNA, 20 bp, Artificial Sequence
  Target B2M Sequence complement
tataatgaatgaaacatttt

SEQ ID NO: 21051 - DNA, 20 bp, Artificial Sequence
  Target B2M Sequence complement
ataatgaatgaaacattttg

SEQ ID NO: 21052 - DNA, 20 bp, Artificial Sequence
  Target B2M Sequence complement
taatgaatgaaacattttgt

SEQ ID NO: 21053 - DNA, 20 bp, Artificial Sequence
  Target B2M Sequence complement
aatgaaacattttgtcatat

SEQ ID NO: 21054 - DNA, 20 bp, Artificial Sequence
  Target B2M Sequence complement
atgaaacattttgtcatata

SEQ ID NO: 21055 - DNA, 20 bp, Artificial Sequence
  Target B2M Sequence complement
tgaaacattttgtcatataa

SEQ ID NO: 21056 - DNA, 20 bp, Artificial Sequence
  Target B2M Sequence complement
aaacattttgtcatataaga

SEQ ID NO: 21057 - DNA, 20 bp, Artificial Sequence
  Target B2M Sequence complement
aacattttgtcatataagat

SEQ ID NO: 21058 - DNA, 20 bp, Artificial Sequence
  Target B2M Sequence complement
acattttgtcatataagatt

SEQ ID NO: 21059 - DNA, 20 bp, Artificial Sequence
  Target B2M Sequence complement
attttgtcatataagattca

SEQ ID NO: 21060 - DNA, 20 bp, Artificial Sequence
  Target B2M Sequence complement
ttttgtcatataagattcat

SEQ ID NO: 21061 - DNA, 20 bp, Artificial Sequence
  Target B2M Sequence complement
tttgtcatataagattcata

SEQ ID NO: 21062 - DNA, 20 bp, Artificial Sequence
  Target B2M Sequence complement
ttgtcatataagattcatat

SEQ ID NO: 21063 - DNA, 20 bp, Artificial Sequence
  Target B2M Sequence complement
tgtcatataagattcatatt

SEQ ID NO: 21064 - DNA, 20 bp, Artificial Sequence
  Target B2M Sequence complement
gtcatataagattcatattt

SEQ ID NO: 21065 - DNA, 20 bp, Artificial Sequence
  Target B2M Sequence complement
tcatataagattcatattta

SEQ ID NO: 21066 - DNA, 20 bp, Artificial Sequence
  Target B2M Sequence complement
catataagattcatatttac

SEQ ID NO: 21067 - DNA, 20 bp, Artificial Sequence
  Target B2M Sequence complement
atataagattcatatttact

SEQ ID NO: 21068 - DNA, 20 bp, Artificial Sequence
  Target B2M Sequence complement
tataagattcatatttactt

SEQ ID NO: 21069 - DNA, 20 bp, Artificial Sequence
  Target B2M Sequence complement
ataagattcatatttacttc

SEQ ID NO: 21070 - DNA, 20 bp, Artificial Sequence
  Target B2M Sequence complement
taagattcatatttacttct

SEQ ID NO: 21071 - DNA, 20 bp, Artificial Sequence
  Target B2M Sequence complement
aagattcatatttacttctt

SEQ ID NO: 21072 - DNA, 20 bp, Artificial Sequence
  Target B2M Sequence complement
agattcatatttacttctta

SEQ ID NO: 21073 - DNA, 20 bp, Artificial Sequence
  Target B2M Sequence complement
gattcatatttacttcttat

SEQ ID NO: 21074 - DNA, 20 bp, Artificial Sequence
  Target B2M Sequence complement
attcatatttacttcttata

SEQ ID NO: 21075 - DNA, 20 bp, Artificial Sequence
  Target B2M Sequence complement
ttcatatttacttcttatac

SEQ ID NO: 21076 - DNA, 20 bp, Artificial Sequence
  Target B2M Sequence complement
tcatatttacttcttataca

SEQ ID NO: 21077 - DNA, 20 bp, Artificial Sequence
  Target B2M Sequence complement
catatttacttcttatacat

SEQ ID NO: 21078 - DNA, 20 bp, Artificial Sequence
  Target B2M Sequence complement
atatttacttcttatacatt

SEQ ID NO: 21079 - DNA, 20 bp, Artificial Sequence
  Target B2M Sequence complement
tatttacttcttatacattt

SEQ ID NO: 21080 - DNA, 20 bp, Artificial Sequence
  Target B2M Sequence complement
atttacttcttatacatttg

SEQ ID NO: 21081 - DNA, 20 bp, Artificial Sequence
  Target B2M Sequence complement
tttacttcttatacatttga

SEQ ID NO: 21082 - DNA, 20 bp, Artificial Sequence
  Target B2M Sequence complement
ttacttcttatacatttgat

SEQ ID NO: 21083 - DNA, 20 bp, Artificial Sequence
  Target B2M Sequence complement
tacttcttatacatttgata

SEQ ID NO: 21084 - DNA, 20 bp, Artificial Sequence
  Target B2M Sequence complement
acttcttatacatttgataa

SEQ ID NO: 21085 - DNA, 20 bp, Artificial Sequence
  Target B2M Sequence complement
cttcttatacatttgataaa

SEQ ID NO: 21086 - DNA, 20 bp, Artificial Sequence
  Target B2M Sequence complement
ttcttatacatttgataaag

SEQ ID NO: 21087 - DNA, 20 bp, Artificial Sequence
  Target B2M Sequence complement
tcttatacatttgataaagt

SEQ ID NO: 21088 - DNA, 20 bp, Artificial Sequence
  Target B2M Sequence complement
cttatacatttgataaagta

SEQ ID NO: 21089 - DNA, 20 bp, Artificial Sequence
  Target B2M Sequence complement
ttatacatttgataaagtaa

SEQ ID NO: 21090 - DNA, 20 bp, Artificial Sequence
  Target B2M Sequence complement
tatacatttgataaagtaag

SEQ ID NO: 21091 - DNA, 20 bp, Artificial Sequence
  Target B2M Sequence complement
ttaatctggtttatttttgt

SEQ ID NO: 21092 - DNA, 20 bp, Artificial Sequence
  Target B2M Sequence complement
taatctggtttatttttgtt

SEQ ID NO: 21093 - DNA, 20 bp, Artificial Sequence
  Target B2M Sequence complement
cacaagttaaataaatcata

SEQ ID NO: 21094 - DNA, 20 bp, Artificial Sequence
  Target B2M Sequence complement
acaagttaaataaatcataa

SEQ ID NO: 21095 - DNA, 20 bp, Artificial Sequence
  Target B2M Sequence complement
caagttaaataaatcataaa

SEQ ID NO: 21096 - DNA, 20 bp, Artificial Sequence
  Target B2M Sequence complement
aagttaaataaatcataaaa

SEQ ID NO: 21097 - DNA, 20 bp, Artificial Sequence
  Target B2M Sequence complement
agttaaataaatcataaaac

SEQ ID NO: 21098 - DNA, 20 bp, Artificial Sequence
  Target B2M Sequence complement
gttaaataaatcataaaact

SEQ ID NO: 21099 - DNA, 20 bp, Artificial Sequence
  Target B2M Sequence complement
ttaaataaatcataaaactt

SEQ ID NO: 21100 - DNA, 20 bp, Artificial Sequence
  Target B2M Sequence complement
taaataaatcataaaacttg

SEQ ID NO: 21101 - DNA, 20 bp, Artificial Sequence
  Target B2M Sequence complement
aaataaatcataaaacttga

SEQ ID NO: 21102 - DNA, 21 bp, Artificial Sequence
  Target B2M Sequence complement
gaagctgacagcattcgggcc

SEQ ID NO: 21103 - DNA, 21 bp, Artificial Sequence
  Target B2M Sequence complement
aagctgacagcattcgggccg

SEQ ID NO: 21104 - DNA, 21 bp, Artificial Sequence
  Target B2M Sequence complement
agctgacagcattcgggccga

SEQ ID NO: 21105 - DNA, 21 bp, Artificial Sequence
  Target B2M Sequence complement
gctgacagcattcgggccgag

SEQ ID NO: 21106 - DNA, 21 bp, Artificial Sequence
  Target B2M Sequence complement
ctgacagcattcgggccgaga

SEQ ID NO: 21107 - DNA, 21 bp, Artificial Sequence
  Target B2M Sequence complement
gacagcattcgggccgagatg

SEQ ID NO: 21108 - DNA, 21 bp, Artificial Sequence
  Target B2M Sequence complement
cagcattcgggccgagatgtc

SEQ ID NO: 21109 - DNA, 21 bp, Artificial Sequence
  Target B2M Sequence complement
gcattcgggccgagatgtctc

SEQ ID NO: 21110 - DNA, 21 bp, Artificial Sequence
  Target B2M Sequence complement
cattcgggccgagatgtctcg

SEQ ID NO: 21111 - DNA, 21 bp, Artificial Sequence
  Target B2M Sequence complement
attcgggccgagatgtctcgc

SEQ ID NO: 21112 - DNA, 21 bp, Artificial Sequence
  Target B2M Sequence complement
ttcgggccgagatgtctcgct

SEQ ID NO: 21113 - DNA, 21 bp, Artificial Sequence
  Target B2M Sequence complement
tcgggccgagatgtctcgctc

SEQ ID NO: 21114 - DNA, 21 bp, Artificial Sequence
  Target B2M Sequence complement
cgggccgagatgtctcgctcc

SEQ ID NO: 21115 - DNA, 21 bp, Artificial Sequence
  Target B2M Sequence complement
gggccgagatgtctcgctccg

SEQ ID NO: 21116 - DNA, 21 bp, Artificial Sequence
  Target B2M Sequence complement
ggccgagatgtctcgctccgt

SEQ ID NO: 21117 - DNA, 21 bp, Artificial Sequence
  Target B2M Sequence complement
gccgagatgtctcgctccgtg

SEQ ID NO: 21118 - DNA, 21 bp, Artificial Sequence
  Target B2M Sequence complement
ccgagatgtctcgctccgtgg

SEQ ID NO: 21119 - DNA, 21 bp, Artificial Sequence
  Target B2M Sequence complement
cgagatgtctcgctccgtggc

SEQ ID NO: 21120 - DNA, 21 bp, Artificial Sequence
  Target B2M Sequence complement
gagatgtctcgctccgtggcc

SEQ ID NO: 21121 - DNA, 21 bp, Artificial Sequence
  Target B2M Sequence complement
agatgtctcgctccgtggcct

SEQ ID NO: 21122 - DNA, 21 bp, Artificial Sequence
  Target B2M Sequence complement
gatgtctcgctccgtggcctt

SEQ ID NO: 21123 - DNA, 21 bp, Artificial Sequence
  Target B2M Sequence complement
tgtctcgctccgtggccttag

SEQ ID NO: 21124 - DNA, 21 bp, Artificial Sequence
  Target B2M Sequence complement
gtctcgctccgtggccttagc

SEQ ID NO: 21125 - DNA, 21 bp, Artificial Sequence
  Target B2M Sequence complement
tctcgctccgtggccttagct

SEQ ID NO: 21126 - DNA, 21 bp, Artificial Sequence
  Target B2M Sequence complement
ctcgctccgtggccttagctg

SEQ ID NO: 21127 - DNA, 21 bp, Artificial Sequence
  Target B2M Sequence complement
tcgctccgtggccttagctgt

SEQ ID NO: 21128 - DNA, 21 bp, Artificial Sequence
  Target B2M Sequence complement
cgctccgtggccttagctgtg

SEQ ID NO: 21129 - DNA, 21 bp, Artificial Sequence
  Target B2M Sequence complement
gctccgtggccttagctgtgc

SEQ ID NO: 21130 - DNA, 21 bp, Artificial Sequence
  Target B2M Sequence complement
ctccgtggccttagctgtgct

SEQ ID NO: 21131 - DNA, 21 bp, Artificial Sequence
  Target B2M Sequence complement
tccgtggccttagctgtgctc

SEQ ID NO: 21132 - DNA, 21 bp, Artificial Sequence
  Target B2M Sequence complement
ccgtggccttagctgtgctcg

SEQ ID NO: 21133 - DNA, 21 bp, Artificial Sequence
  Target B2M Sequence complement
cgtggccttagctgtgctcgc

SEQ ID NO: 21134 - DNA, 21 bp, Artificial Sequence
  Target B2M Sequence complement
gtggccttagctgtgctcgcg

SEQ ID NO: 21135 - DNA, 21 bp, Artificial Sequence
  Target B2M Sequence complement
tggccttagctgtgctcgcgc

SEQ ID NO: 21136 - DNA, 21 bp, Artificial Sequence
  Target B2M Sequence complement
ggccttagctgtgctcgcgct

SEQ ID NO: 21137 - DNA, 21 bp, Artificial Sequence
  Target B2M Sequence complement
gccttagctgtgctcgcgcta

SEQ ID NO: 21138 - DNA, 21 bp, Artificial Sequence
  Target B2M Sequence complement
ccttagctgtgctcgcgctac

SEQ ID NO: 21139 - DNA, 21 bp, Artificial Sequence
  Target B2M Sequence complement
agctgtgctcgcgctactctc

SEQ ID NO: 21140 - DNA, 21 bp, Artificial Sequence
  Target B2M Sequence complement
gctgtgctcgcgctactctct

SEQ ID NO: 21141 - DNA, 21 bp, Artificial Sequence
  Target B2M Sequence complement
ctgtgctcgcgctactctctc

SEQ ID NO: 21142 - DNA, 21 bp, Artificial Sequence
  Target B2M Sequence complement
ctctctttctggcctggaggc

SEQ ID NO: 21143 - DNA, 21 bp, Artificial Sequence
  Target B2M Sequence complement
tctggcctggaggctatccag

SEQ ID NO: 21144 - DNA, 21 bp, Artificial Sequence
  Target B2M Sequence complement
ctggcctggaggctatccagc

SEQ ID NO: 21145 - DNA, 21 bp, Artificial Sequence
  Target B2M Sequence complement
tggcctggaggctatccagcg

SEQ ID NO: 21146 - DNA, 21 bp, Artificial Sequence
  Target B2M Sequence complement
ggcctggaggctatccagcgt

SEQ ID NO: 21147 - DNA, 21 bp, Artificial Sequence
  Target B2M Sequence complement
gcctggaggctatccagcgta

SEQ ID NO: 21148 - DNA, 21 bp, Artificial Sequence
  Target B2M Sequence complement
cctggaggctatccagcgtac

SEQ ID NO: 21149 - DNA, 21 bp, Artificial Sequence
  Target B2M Sequence complement
ggaggctatccagcgtactcc

SEQ ID NO: 21150 - DNA, 21 bp, Artificial Sequence
  Target B2M Sequence complement
gcctgccgtgtgaaccatgtg

SEQ ID NO: 21151 - DNA, 21 bp, Artificial Sequence
  Target B2M Sequence complement
ttgcttgctttttaatattga

SEQ ID NO: 21152 - DNA, 21 bp, Artificial Sequence
  Target B2M Sequence complement
tgcttgctttttaatattgat

SEQ ID NO: 21153 - DNA, 21 bp, Artificial Sequence
  Target B2M Sequence complement
gcttgctttttaatattgata

SEQ ID NO: 21154 - DNA, 21 bp, Artificial Sequence
  Target B2M Sequence complement
cttgctttttaatattgatat

SEQ ID NO: 21155 - DNA, 21 bp, Artificial Sequence
  Target B2M Sequence complement
ttgctttttaatattgatatg

SEQ ID NO: 21156 - DNA, 21 bp, Artificial Sequence
  Target B2M Sequence complement
tgctttttaatattgatatgc

SEQ ID NO: 21157 - DNA, 21 bp, Artificial Sequence
  Target B2M Sequence complement
gctttttaatattgatatgct

SEQ ID NO: 21158 - DNA, 21 bp, Artificial Sequence
  Target B2M Sequence complement
ctttttaatattgatatgctt

SEQ ID NO: 21159 - DNA, 21 bp, Artificial Sequence
  Target B2M Sequence complement
tttttaatattgatatgctta

SEQ ID NO: 21160 - DNA, 21 bp, Artificial Sequence
  Target B2M Sequence complement
ttttaatattgatatgcttat

SEQ ID NO: 21161 - DNA, 21 bp, Artificial Sequence
  Target B2M Sequence complement
tttaatattgatatgcttata

SEQ ID NO: 21162 - DNA, 21 bp, Artificial Sequence
  Target B2M Sequence complement
ttaatattgatatgcttatac

SEQ ID NO: 21163 - DNA, 21 bp, Artificial Sequence
  Target B2M Sequence complement
taatattgatatgcttataca

SEQ ID NO: 21164 - DNA, 21 bp, Artificial Sequence
  Target B2M Sequence complement
aatattgatatgcttatacac

SEQ ID NO: 21165 - DNA, 21 bp, Artificial Sequence
  Target B2M Sequence complement
atattgatatgcttatacact

SEQ ID NO: 21166 - DNA, 21 bp, Artificial Sequence
  Target B2M Sequence complement
tattgatatgcttatacactt

SEQ ID NO: 21167 - DNA, 21 bp, Artificial Sequence
  Target B2M Sequence complement
attgatatgcttatacactta

SEQ ID NO: 21168 - DNA, 21 bp, Artificial Sequence
  Target B2M Sequence complement
acaaaatgtagggttataata

SEQ ID NO: 21169 - DNA, 21 bp, Artificial Sequence
  Target B2M Sequence complement
caaaatgtagggttataataa

SEQ ID NO: 21170 - DNA, 21 bp, Artificial Sequence
  Target B2M Sequence complement
aaaatgtagggttataataat

SEQ ID NO: 21171 - DNA, 21 bp, Artificial Sequence
  Target B2M Sequence complement
aaatgtagggttataataatg

SEQ ID NO: 21172 - DNA, 21 bp, Artificial Sequence
  Target B2M Sequence complement
aatgtagggttataataatgt

SEQ ID NO: 21173 - DNA, 21 bp, Artificial Sequence
  Target B2M Sequence complement
atgtagggttataataatgtt

SEQ ID NO: 21174 - DNA, 21 bp, Artificial Sequence
  Target B2M Sequence complement
tgtagggttataataatgtta

SEQ ID NO: 21175 - DNA, 21 bp, Artificial Sequence
  Target B2M Sequence complement
gtagggttataataatgttaa

SEQ ID NO: 21176 - DNA, 21 bp, Artificial Sequence
  Target B2M Sequence complement
tagggttataataatgttaac

SEQ ID NO: 21177 - DNA, 21 bp, Artificial Sequence
  Target B2M Sequence complement
agggttataataatgttaaca

SEQ ID NO: 21178 - DNA, 21 bp, Artificial Sequence
  Target B2M Sequence complement
gggttataataatgttaacat

SEQ ID NO: 21179 - DNA, 21 bp, Artificial Sequence
  Target B2M Sequence complement
ggttataataatgttaacatg

SEQ ID NO: 21180 - DNA, 21 bp, Artificial Sequence
  Target B2M Sequence complement
gttataataatgttaacatgg

SEQ ID NO: 21181 - DNA, 21 bp, Artificial Sequence
  Target B2M Sequence complement
ttataataatgttaacatgga

SEQ ID NO: 21182 - DNA, 21 bp, Artificial Sequence
  Target B2M Sequence complement
tataataatgttaacatggac

SEQ ID NO: 21183 - DNA, 21 bp, Artificial Sequence
  Target B2M Sequence complement
ataataatgttaacatggaca

SEQ ID NO: 21184 - DNA, 21 bp, Artificial Sequence
  Target B2M Sequence complement
taataatgttaacatggacat

SEQ ID NO: 21185 - DNA, 21 bp, Artificial Sequence
  Target B2M Sequence complement
gacatgatcttctttataatt

SEQ ID NO: 21186 - DNA, 21 bp, Artificial Sequence
  Target B2M Sequence complement
acatgatcttctttataattc

SEQ ID NO: 21187 - DNA, 21 bp, Artificial Sequence
  Target B2M Sequence complement
catgatcttctttataattct

SEQ ID NO: 21188 - DNA, 21 bp, Artificial Sequence
  Target B2M Sequence complement
atgatcttctttataattcta

SEQ ID NO: 21189 - DNA, 21 bp, Artificial Sequence
  Target B2M Sequence complement
tgatcttctttataattctac

SEQ ID NO: 21190 - DNA, 21 bp, Artificial Sequence
  Target B2M Sequence complement
gatcttctttataattctact

SEQ ID NO: 21191 - DNA, 21 bp, Artificial Sequence
  Target B2M Sequence complement
atcttctttataattctactt

SEQ ID NO: 21192 - DNA, 21 bp, Artificial Sequence
  Target B2M Sequence complement
tcttctttataattctacttt

SEQ ID NO: 21193 - DNA, 21 bp, Artificial Sequence
  Target B2M Sequence complement
cttctttataattctactttg

SEQ ID NO: 21194 - DNA, 21 bp, Artificial Sequence
  Target B2M Sequence complement
ttctttataattctactttga

SEQ ID NO: 21195 - DNA, 21 bp, Artificial Sequence
  Target B2M Sequence complement
tctttataattctactttgag

SEQ ID NO: 21196 - DNA, 21 bp, Artificial Sequence
  Target B2M Sequence complement
ctttataattctactttgagt

SEQ ID NO: 21197 - DNA, 21 bp, Artificial Sequence
  Target B2M Sequence complement
tttataattctactttgagtg

SEQ ID NO: 21198 - DNA, 21 bp, Artificial Sequence
  Target B2M Sequence complement
ctgagcaggttgctccacagg

SEQ ID NO: 21199 - DNA, 21 bp, Artificial Sequence
  Target B2M Sequence complement
gcaggttgctccacaggtagc

SEQ ID NO: 21200 - DNA, 21 bp, Artificial Sequence
  Target B2M Sequence complement
ccacaggtagctctaggaggg

SEQ ID NO: 21201 - DNA, 21 bp, Artificial Sequence
  Target B2M Sequence complement
cacaggtagctctaggagggc

SEQ ID NO: 21202 - DNA, 21 bp, Artificial Sequence
  Target B2M Sequence complement
caggtagctctaggagggctg

SEQ ID NO: 21203 - DNA, 21 bp, Artificial Sequence
  Target B2M Sequence complement
aggtagctctaggagggctgg

SEQ ID NO: 21204 - DNA, 21 bp, Artificial Sequence
  Target B2M Sequence complement
ggtagctctaggagggctggc

SEQ ID NO: 21205 - DNA, 21 bp, Artificial Sequence
  Target B2M Sequence complement
gtagctctaggagggctggca

SEQ ID NO: 21206 - DNA, 21 bp, Artificial Sequence
  Target B2M Sequence complement
agctctaggagggctggcaac

SEQ ID NO: 21207 - DNA, 21 bp, Artificial Sequence
  Target B2M Sequence complement
gctctaggagggctggcaact

SEQ ID NO: 21208 - DNA, 21 bp, Artificial Sequence
  Target B2M Sequence complement
ggagggctggcaacttagagg

SEQ ID NO: 21209 - DNA, 21 bp, Artificial Sequence
  Target B2M Sequence complement
gggctggcaacttagaggtgg

SEQ ID NO: 21210 - DNA, 21 bp, Artificial Sequence
  Target B2M Sequence complement
ggctggcaacttagaggtggg

SEQ ID NO: 21211 - DNA, 21 bp, Artificial Sequence
  Target B2M Sequence complement
gctggcaacttagaggtgggg

SEQ ID NO: 21212 - DNA, 21 bp, Artificial Sequence
  Target B2M Sequence complement
ggcaacttagaggtggggagc

SEQ ID NO: 21213 - DNA, 21 bp, Artificial Sequence
  Target B2M Sequence complement
aaagcttgttaagatagttaa

SEQ ID NO: 21214 - DNA, 21 bp, Artificial Sequence
  Target B2M Sequence complement
cataagttaacttccaattta

SEQ ID NO: 21215 - DNA, 21 bp, Artificial Sequence
  Target B2M Sequence complement
ataagttaacttccaatttac

SEQ ID NO: 21216 - DNA, 21 bp, Artificial Sequence
  Target B2M Sequence complement
taagttaacttccaatttaca

SEQ ID NO: 21217 - DNA, 21 bp, Artificial Sequence
  Target B2M Sequence complement
aagttaacttccaatttacat

SEQ ID NO: 21218 - DNA, 21 bp, Artificial Sequence
  Target B2M Sequence complement
agttaacttccaatttacata

SEQ ID NO: 21219 - DNA, 21 bp, Artificial Sequence
  Target B2M Sequence complement
ttaacttccaatttacatact

SEQ ID NO: 21220 - DNA, 21 bp, Artificial Sequence
  Target B2M Sequence complement
ggggaaaatttagaaatataa

SEQ ID NO: 21221 - DNA, 21 bp, Artificial Sequence
  Target B2M Sequence complement
gggaaaatttagaaatataat

SEQ ID NO: 21222 - DNA, 21 bp, Artificial Sequence
  Target B2M Sequence complement
ggaaaatttagaaatataatt

SEQ ID NO: 21223 - DNA, 21 bp, Artificial Sequence
  Target B2M Sequence complement
gaaaatttagaaatataattg

SEQ ID NO: 21224 - DNA, 21 bp, Artificial Sequence
  Target B2M Sequence complement
aaaatttagaaatataattga

SEQ ID NO: 21225 - DNA, 21 bp, Artificial Sequence
  Target B2M Sequence complement
aaatttagaaatataattgac

SEQ ID NO: 21226 - DNA, 21 bp, Artificial Sequence
  Target B2M Sequence complement
aatttagaaatataattgaca

SEQ ID NO: 21227 - DNA, 21 bp, Artificial Sequence
  Target B2M Sequence complement
atttagaaatataattgacag

SEQ ID NO: 21228 - DNA, 21 bp, Artificial Sequence
  Target B2M Sequence complement
tttagaaatataattgacagg

SEQ ID NO: 21229 - DNA, 21 bp, Artificial Sequence
  Target B2M Sequence complement
ttagaaatataattgacagga

SEQ ID NO: 21230 - DNA, 21 bp, Artificial Sequence
  Target B2M Sequence complement
tagaaatataattgacaggat

SEQ ID NO: 21231 - DNA, 21 bp, Artificial Sequence
  Target B2M Sequence complement
agaaatataattgacaggatt

SEQ ID NO: 21232 - DNA, 21 bp, Artificial Sequence
  Target B2M Sequence complement
gaaatataattgacaggatta

SEQ ID NO: 21233 - DNA, 21 bp, Artificial Sequence
  Target B2M Sequence complement
aaatataattgacaggattat

SEQ ID NO: 21234 - DNA, 21 bp, Artificial Sequence
  Target B2M Sequence complement
aatataattgacaggattatt

SEQ ID NO: 21235 - DNA, 21 bp, Artificial Sequence
  Target B2M Sequence complement
atataattgacaggattattg

SEQ ID NO: 21236 - DNA, 21 bp, Artificial Sequence
  Target B2M Sequence complement
aggattattggaaatttgtta

SEQ ID NO: 21237 - DNA, 21 bp, Artificial Sequence
  Target B2M Sequence complement
ggattattggaaatttgttat

SEQ ID NO: 21238 - DNA, 21 bp, Artificial Sequence
  Target B2M Sequence complement
gattattggaaatttgttata

SEQ ID NO: 21239 - DNA, 21 bp, Artificial Sequence
  Target B2M Sequence complement
attattggaaatttgttataa

SEQ ID NO: 21240 - DNA, 21 bp, Artificial Sequence
  Target B2M Sequence complement
ttattggaaatttgttataat

SEQ ID NO: 21241 - DNA, 21 bp, Artificial Sequence
  Target B2M Sequence complement
tattggaaatttgttataatg

SEQ ID NO: 21242 - DNA, 21 bp, Artificial Sequence
  Target B2M Sequence complement
attggaaatttgttataatga

SEQ ID NO: 21243 - DNA, 21 bp, Artificial Sequence
  Target B2M Sequence complement
ttggaaatttgttataatgaa

SEQ ID NO: 21244 - DNA, 21 bp, Artificial Sequence
  Target B2M Sequence complement
tggaaatttgttataatgaat

SEQ ID NO: 21245 - DNA, 21 bp, Artificial Sequence
  Target B2M Sequence complement
ggaaatttgttataatgaatg

SEQ ID NO: 21246 - DNA, 21 bp, Artificial Sequence
  Target B2M Sequence complement
gaaatttgttataatgaatga

SEQ ID NO: 21247 - DNA, 21 bp, Artificial Sequence
  Target B2M Sequence complement
aaatttgttataatgaatgaa

SEQ ID NO: 21248 - DNA, 21 bp, Artificial Sequence
  Target B2M Sequence complement
aatttgttataatgaatgaaa

SEQ ID NO: 21249 - DNA, 21 bp, Artificial Sequence
  Target B2M Sequence complement
atttgttataatgaatgaaac

SEQ ID NO: 21250 - DNA, 21 bp, Artificial Sequence
  Target B2M Sequence complement
tttgttataatgaatgaaaca

SEQ ID NO: 21251 - DNA, 21 bp, Artificial Sequence
  Target B2M Sequence complement
ttgttataatgaatgaaacat

SEQ ID NO: 21252 - DNA, 21 bp, Artificial Sequence
  Target B2M Sequence complement
tgttataatgaatgaaacatt

SEQ ID NO: 21253 - DNA, 21 bp, Artificial Sequence
  Target B2M Sequence complement
gttataatgaatgaaacattt

SEQ ID NO: 21254 - DNA, 21 bp, Artificial Sequence
  Target B2M Sequence complement
ttataatgaatgaaacatttt

SEQ ID NO: 21255 - DNA, 21 bp, Artificial Sequence
  Target B2M Sequence complement
tataatgaatgaaacattttg

SEQ ID NO: 21256 - DNA, 21 bp, Artificial Sequence
  Target B2M Sequence complement
ataatgaatgaaacattttgt

SEQ ID NO: 21257 - DNA, 21 bp, Artificial Sequence
  Target B2M Sequence complement
taatgaatgaaacattttgtc

SEQ ID NO: 21258 - DNA, 21 bp, Artificial Sequence
  Target B2M Sequence complement
aatgaatgaaacattttgtca

SEQ ID NO: 21259 - DNA, 21 bp, Artificial Sequence
  Target B2M Sequence complement
atgaatgaaacattttgtcat

SEQ ID NO: 21260 - DNA, 21 bp, Artificial Sequence
  Target B2M Sequence complement
tgaatgaaacattttgtcata

SEQ ID NO: 21261 - DNA, 21 bp, Artificial Sequence
  Target B2M Sequence complement
gaatgaaacattttgtcatat

SEQ ID NO: 21262 - DNA, 21 bp, Artificial Sequence
  Target B2M Sequence complement
aatgaaacattttgtcatata

SEQ ID NO: 21263 - DNA, 21 bp, Artificial Sequence
  Target B2M Sequence complement
atgaaacattttgtcatataa

SEQ ID NO: 21264 - DNA, 21 bp, Artificial Sequence
  Target B2M Sequence complement
tgaaacattttgtcatataag

SEQ ID NO: 21265 - DNA, 21 bp, Artificial Sequence
  Target B2M Sequence complement
gaaacattttgtcatataaga

SEQ ID NO: 21266 - DNA, 21 bp, Artificial Sequence
  Target B2M Sequence complement
aaacattttgtcatataagat

SEQ ID NO: 21267 - DNA, 21 bp, Artificial Sequence
  Target B2M Sequence complement
aacattttgtcatataagatt

SEQ ID NO: 21268 - DNA, 21 bp, Artificial Sequence
  Target B2M Sequence complement
acattttgtcatataagattc

SEQ ID NO: 21269 - DNA, 21 bp, Artificial Sequence
  Target B2M Sequence complement
cattttgtcatataagattca

SEQ ID NO: 21270 - DNA, 21 bp, Artificial Sequence
  Target B2M Sequence complement
attttgtcatataagattcat

SEQ ID NO: 21271 - DNA, 21 bp, Artificial Sequence
  Target B2M Sequence complement
ttttgtcatataagattcata

SEQ ID NO: 21272 - DNA, 21 bp, Artificial Sequence
  Target B2M Sequence complement
tttgtcatataagattcatat

SEQ ID NO: 21273 - DNA, 21 bp, Artificial Sequence
  Target B2M Sequence complement
ttgtcatataagattcatatt

SEQ ID NO: 21274 - DNA, 21 bp, Artificial Sequence
  Target B2M Sequence complement
tgtcatataagattcatattt

SEQ ID NO: 21275 - DNA, 21 bp, Artificial Sequence
  Target B2M Sequence complement
gtcatataagattcatattta

SEQ ID NO: 21276 - DNA, 21 bp, Artificial Sequence
  Target B2M Sequence complement
tcatataagattcatatttac

SEQ ID NO: 21277 - DNA, 21 bp, Artificial Sequence
  Target B2M Sequence complement
catataagattcatatttact

SEQ ID NO: 21278 - DNA, 21 bp, Artificial Sequence
  Target B2M Sequence complement
atataagattcatatttactt

SEQ ID NO: 21279 - DNA, 21 bp, Artificial Sequence
  Target B2M Sequence complement
tataagattcatatttacttc

SEQ ID NO: 21280 - DNA, 21 bp, Artificial Sequence
  Target B2M Sequence complement
ataagattcatatttacttct

SEQ ID NO: 21281 - DNA, 21 bp, Artificial Sequence
  Target B2M Sequence complement
taagattcatatttacttctt

SEQ ID NO: 21282 - DNA, 21 bp, Artificial Sequence
  Target B2M Sequence complement
aagattcatatttacttctta

SEQ ID NO: 21283 - DNA, 21 bp, Artificial Sequence
  Target B2M Sequence complement
agattcatatttacttcttat

SEQ ID NO: 21284 - DNA, 21 bp, Artificial Sequence
  Target B2M Sequence complement
gattcatatttacttcttata

SEQ ID NO: 21285 - DNA, 21 bp, Artificial Sequence
  Target B2M Sequence complement
attcatatttacttcttatac

SEQ ID NO: 21286 - DNA, 21 bp, Artificial Sequence
  Target B2M Sequence complement
ttcatatttacttcttataca

SEQ ID NO: 21287 - DNA, 21 bp, Artificial Sequence
  Target B2M Sequence complement
tcatatttacttcttatacat

SEQ ID NO: 21288 - DNA, 21 bp, Artificial Sequence
  Target B2M Sequence complement
catatttacttcttatacatt

SEQ ID NO: 21289 - DNA, 21 bp, Artificial Sequence
  Target B2M Sequence complement
atatttacttcttatacattt

SEQ ID NO: 21290 - DNA, 21 bp, Artificial Sequence
  Target B2M Sequence complement
tatttacttcttatacatttg

SEQ ID NO: 21291 - DNA, 21 bp, Artificial Sequence
  Target B2M Sequence complement
atttacttcttatacatttga

SEQ ID NO: 21292 - DNA, 21 bp, Artificial Sequence
  Target B2M Sequence complement
tttacttcttatacatttgat

SEQ ID NO: 21293 - DNA, 21 bp, Artificial Sequence
  Target B2M Sequence complement
ttacttcttatacatttgata

SEQ ID NO: 21294 - DNA, 21 bp, Artificial Sequence
  Target B2M Sequence complement
tacttcttatacatttgataa

SEQ ID NO: 21295 - DNA, 21 bp, Artificial Sequence
  Target B2M Sequence complement
acttcttatacatttgataaa

SEQ ID NO: 21296 - DNA, 21 bp, Artificial Sequence
  Target B2M Sequence complement
cttcttatacatttgataaag

SEQ ID NO: 21297 - DNA, 21 bp, Artificial Sequence
  Target B2M Sequence complement
ttcttatacatttgataaagt

SEQ ID NO: 21298 - DNA, 21 bp, Artificial Sequence
  Target B2M Sequence complement
tcttatacatttgataaagta

SEQ ID NO: 21299 - DNA, 21 bp, Artificial Sequence
  Target B2M Sequence complement
cttatacatttgataaagtaa

SEQ ID NO: 21300 - DNA, 21 bp, Artificial Sequence
  Target B2M Sequence complement
ttatacatttgataaagtaag

SEQ ID NO: 21301 - DNA, 21 bp, Artificial Sequence
  Target B2M Sequence complement
tatacatttgataaagtaagg

SEQ ID NO: 21302 - DNA, 21 bp, Artificial Sequence
  Target B2M Sequence complement
tggttaatctggtttattttt

SEQ ID NO: 21303 - DNA, 21 bp, Artificial Sequence
  Target B2M Sequence complement
gttaatctggtttatttttgt

SEQ ID NO: 21304 - DNA, 21 bp, Artificial Sequence
  Target B2M Sequence complement
ttaatctggtttatttttgtt

SEQ ID NO: 21305 - DNA, 21 bp, Artificial Sequence
  Target B2M Sequence complement
taatctggtttatttttgttc

SEQ ID NO: 21306 - DNA, 21 bp, Artificial Sequence
  Target B2M Sequence complement
tttatttttgttccacaagtt

SEQ ID NO: 21307 - DNA, 21 bp, Artificial Sequence
  Target B2M Sequence complement
ttatttttgttccacaagtta

SEQ ID NO: 21308 - DNA, 21 bp, Artificial Sequence
  Target B2M Sequence complement
tatttttgttccacaagttaa

SEQ ID NO: 21309 - DNA, 21 bp, Artificial Sequence
  Target B2M Sequence complement
atttttgttccacaagttaaa

SEQ ID NO: 21310 - DNA, 21 bp, Artificial Sequence
  Target B2M Sequence complement
tttttgttccacaagttaaat

SEQ ID NO: 21311 - DNA, 21 bp, Artificial Sequence
  Target B2M Sequence complement
ttttgttccacaagttaaata

SEQ ID NO: 21312 - DNA, 21 bp, Artificial Sequence
  Target B2M Sequence complement
tttgttccacaagttaaataa

SEQ ID NO: 21313 - DNA, 21 bp, Artificial Sequence
  Target B2M Sequence complement
ttgttccacaagttaaataaa

SEQ ID NO: 21314 - DNA, 21 bp, Artificial Sequence
  Target B2M Sequence complement
tgttccacaagttaaataaat

SEQ ID NO: 21315 - DNA, 21 bp, Artificial Sequence
  Target B2M Sequence complement
ttccacaagttaaataaatca

SEQ ID NO: 21316 - DNA, 21 bp, Artificial Sequence
  Target B2M Sequence complement
tccacaagttaaataaatcat

SEQ ID NO: 21317 - DNA, 21 bp, Artificial Sequence
  Target B2M Sequence complement
ccacaagttaaataaatcata

SEQ ID NO: 21318 - DNA, 21 bp, Artificial Sequence
  Target B2M Sequence complement
cacaagttaaataaatcataa

SEQ ID NO: 21319 - DNA, 21 bp, Artificial Sequence
  Target B2M Sequence complement
acaagttaaataaatcataaa

SEQ ID NO: 21320 - DNA, 21 bp, Artificial Sequence
  Target B2M Sequence complement
caagttaaataaatcataaaa

SEQ ID NO: 21321 - DNA, 21 bp, Artificial Sequence
  Target B2M Sequence complement
aagttaaataaatcataaaac

SEQ ID NO: 21322 - DNA, 21 bp, Artificial Sequence
  Target B2M Sequence complement
agttaaataaatcataaaact

SEQ ID NO: 21323 - DNA, 21 bp, Artificial Sequence
  Target B2M Sequence complement
gttaaataaatcataaaactt

SEQ ID NO: 21324 - DNA, 21 bp, Artificial Sequence
  Target B2M Sequence complement
ttaaataaatcataaaacttg

SEQ ID NO: 21325 - DNA, 21 bp, Artificial Sequence
  Target B2M Sequence complement
taaataaatcataaaacttga

SEQ ID NO: 21326 - DNA, 22 bp, Artificial Sequence
  Target B2M Sequence complement
gaagctgacagcattcgggccg

SEQ ID NO: 21327 - DNA, 22 bp, Artificial Sequence
  Target B2M Sequence complement
agctgacagcattcgggccgag

SEQ ID NO: 21328 - DNA, 22 bp, Artificial Sequence
  Target B2M Sequence complement
gctgacagcattcgggccgaga

SEQ ID NO: 21329 - DNA, 22 bp, Artificial Sequence
  Target B2M Sequence complement
gcattcgggccgagatgtctcg

SEQ ID NO: 21330 - DNA, 22 bp, Artificial Sequence
  Target B2M Sequence complement
cattcgggccgagatgtctcgc

SEQ ID NO: 21331 - DNA, 22 bp, Artificial Sequence
  Target B2M Sequence complement
ttcgggccgagatgtctcgctc

SEQ ID NO: 21332 - DNA, 22 bp, Artificial Sequence
  Target B2M Sequence complement
tcgggccgagatgtctcgctcc

SEQ ID NO: 21333 - DNA, 22 bp, Artificial Sequence
  Target B2M Sequence complement
cgggccgagatgtctcgctccg

SEQ ID NO: 21334 - DNA, 22 bp, Artificial Sequence
  Target B2M Sequence complement
gggccgagatgtctcgctccgt

SEQ ID NO: 21335 - DNA, 22 bp, Artificial Sequence
  Target B2M Sequence complement
ggccgagatgtctcgctccgtg

SEQ ID NO: 21336 - DNA, 22 bp, Artificial Sequence
  Target B2M Sequence complement
gccgagatgtctcgctccgtgg

SEQ ID NO: 21337 - DNA, 22 bp, Artificial Sequence
  Target B2M Sequence complement
ccgagatgtctcgctccgtggc

SEQ ID NO: 21338 - DNA, 22 bp, Artificial Sequence
  Target B2M Sequence complement
cgagatgtctcgctccgtggcc

SEQ ID NO: 21339 - DNA, 22 bp, Artificial Sequence
  Target B2M Sequence complement
gagatgtctcgctccgtggcct

SEQ ID NO: 21340 - DNA, 22 bp, Artificial Sequence
  Target B2M Sequence complement
tgtctcgctccgtggccttagc

SEQ ID NO: 21341 - DNA, 22 bp, Artificial Sequence
  Target B2M Sequence complement
gtctcgctccgtggccttagct

SEQ ID NO: 21342 - DNA, 22 bp, Artificial Sequence
  Target B2M Sequence complement
tctcgctccgtggccttagctg

SEQ ID NO: 21343 - DNA, 22 bp, Artificial Sequence
  Target B2M Sequence complement
ctcgctccgtggccttagctgt

SEQ ID NO: 21344 - DNA, 22 bp, Artificial Sequence
  Target B2M Sequence complement
tcgctccgtggccttagctgtg

SEQ ID NO: 21345 - DNA, 22 bp, Artificial Sequence
  Target B2M Sequence complement
cgctccgtggccttagctgtgc

SEQ ID NO: 21346 - DNA, 22 bp, Artificial Sequence
  Target B2M Sequence complement
gctccgtggccttagctgtgct

SEQ ID NO: 21347 - DNA, 22 bp, Artificial Sequence
  Target B2M Sequence complement
ctccgtggccttagctgtgctc

SEQ ID NO: 21348 - DNA, 22 bp, Artificial Sequence
  Target B2M Sequence complement
tccgtggccttagctgtgctcg

SEQ ID NO: 21349 - DNA, 22 bp, Artificial Sequence
  Target B2M Sequence complement
ccgtggccttagctgtgctcgc

SEQ ID NO: 21350 - DNA, 22 bp, Artificial Sequence
  Target B2M Sequence complement
cgtggccttagctgtgctcgcg

SEQ ID NO: 21351 - DNA, 22 bp, Artificial Sequence
  Target B2M Sequence complement
gtggccttagctgtgctcgcgc

SEQ ID NO: 21352 - DNA, 22 bp, Artificial Sequence
  Target B2M Sequence complement
tggccttagctgtgctcgcgct

SEQ ID NO: 21353 - DNA, 22 bp, Artificial Sequence
  Target B2M Sequence complement
ggccttagctgtgctcgcgcta

SEQ ID NO: 21354 - DNA, 22 bp, Artificial Sequence
  Target B2M Sequence complement
gccttagctgtgctcgcgctac

SEQ ID NO: 21355 - DNA, 22 bp, Artificial Sequence
  Target B2M Sequence complement
gctgtgctcgcgctactctctc

SEQ ID NO: 21356 - DNA, 22 bp, Artificial Sequence
  Target B2M Sequence complement
tctggcctggaggctatccagc

SEQ ID NO: 21357 - DNA, 22 bp, Artificial Sequence
  Target B2M Sequence complement
ctggcctggaggctatccagcg

SEQ ID NO: 21358 - DNA, 22 bp, Artificial Sequence
  Target B2M Sequence complement
tggcctggaggctatccagcgt

SEQ ID NO: 21359 - DNA, 22 bp, Artificial Sequence
  Target B2M Sequence complement
ggcctggaggctatccagcgta

SEQ ID NO: 21360 - DNA, 22 bp, Artificial Sequence
  Target B2M Sequence complement
gcctggaggctatccagcgtac

SEQ ID NO: 21361 - DNA, 22 bp, Artificial Sequence
  Target B2M Sequence complement
ttgcttgctttttaatattgat

SEQ ID NO: 21362 - DNA, 22 bp, Artificial Sequence
  Target B2M Sequence complement
tgcttgctttttaatattgata

SEQ ID NO: 21363 - DNA, 22 bp, Artificial Sequence
  Target B2M Sequence complement
gcttgctttttaatattgatat

SEQ ID NO: 21364 - DNA, 22 bp, Artificial Sequence
  Target B2M Sequence complement
cttgctttttaatattgatatg

SEQ ID NO: 21365 - DNA, 22 bp, Artificial Sequence
  Target B2M Sequence complement
ttgctttttaatattgatatgc

SEQ ID NO: 21366 - DNA, 22 bp, Artificial Sequence
  Target B2M Sequence complement
tgctttttaatattgatatgct

SEQ ID NO: 21367 - DNA, 22 bp, Artificial Sequence
  Target B2M Sequence complement
gctttttaatattgatatgctt

SEQ ID NO: 21368 - DNA, 22 bp, Artificial Sequence
  Target B2M Sequence complement
ctttttaatattgatatgctta

SEQ ID NO: 21369 - DNA, 22 bp, Artificial Sequence
  Target B2M Sequence complement
tttttaatattgatatgcttat

SEQ ID NO: 21370 - DNA, 22 bp, Artificial Sequence
  Target B2M Sequence complement
ttttaatattgatatgcttata

SEQ ID NO: 21371 - DNA, 22 bp, Artificial Sequence
  Target B2M Sequence complement
tttaatattgatatgcttatac

SEQ ID NO: 21372 - DNA, 22 bp, Artificial Sequence
  Target B2M Sequence complement
ttaatattgatatgcttataca

SEQ ID NO: 21373 - DNA, 22 bp, Artificial Sequence
  Target B2M Sequence complement
taatattgatatgcttatacac

SEQ ID NO: 21374 - DNA, 22 bp, Artificial Sequence
  Target B2M Sequence complement
aatattgatatgcttatacact

SEQ ID NO: 21375 - DNA, 22 bp, Artificial Sequence
  Target B2M Sequence complement
atattgatatgcttatacactt

SEQ ID NO: 21376 - DNA, 22 bp, Artificial Sequence
  Target B2M Sequence complement
tattgatatgcttatacactta

SEQ ID NO: 21377 - DNA, 22 bp, Artificial Sequence
  Target B2M Sequence complement
acaaaatgtagggttataataa

SEQ ID NO: 21378 - DNA, 22 bp, Artificial Sequence
  Target B2M Sequence complement
caaaatgtagggttataataat

SEQ ID NO: 21379 - DNA, 22 bp, Artificial Sequence
  Target B2M Sequence complement
aaaatgtagggttataataatg

SEQ ID NO: 21380 - DNA, 22 bp, Artificial Sequence
  Target B2M Sequence complement
aaatgtagggttataataatgt

SEQ ID NO: 21381 - DNA, 22 bp, Artificial Sequence
  Target B2M Sequence complement
aatgtagggttataataatgtt

SEQ ID NO: 21382 - DNA, 22 bp, Artificial Sequence
  Target B2M Sequence complement
atgtagggttataataatgtta

SEQ ID NO: 21383 - DNA, 22 bp, Artificial Sequence
  Target B2M Sequence complement
tgtagggttataataatgttaa

SEQ ID NO: 21384 - DNA, 22 bp, Artificial Sequence
  Target B2M Sequence complement
tagggttataataatgttaaca

SEQ ID NO: 21385 - DNA, 22 bp, Artificial Sequence
  Target B2M Sequence complement
agggttataataatgttaacat

SEQ ID NO: 21386 - DNA, 22 bp, Artificial Sequence
  Target B2M Sequence complement
gttataataatgttaacatgga

SEQ ID NO: 21387 - DNA, 22 bp, Artificial Sequence
  Target B2M Sequence complement
ttataataatgttaacatggac

SEQ ID NO: 21388 - DNA, 22 bp, Artificial Sequence
  Target B2M Sequence complement
tataataatgttaacatggaca

SEQ ID NO: 21389 - DNA, 22 bp, Artificial Sequence
  Target B2M Sequence complement
ataataatgttaacatggacat

SEQ ID NO: 21390 - DNA, 22 bp, Artificial Sequence
  Target B2M Sequence complement
acatgatcttctttataattct

SEQ ID NO: 21391 - DNA, 22 bp, Artificial Sequence
  Target B2M Sequence complement
catgatcttctttataattcta

SEQ ID NO: 21392 - DNA, 22 bp, Artificial Sequence
  Target B2M Sequence complement
atgatcttctttataattctac

SEQ ID NO: 21393 - DNA, 22 bp, Artificial Sequence
  Target B2M Sequence complement
tgatcttctttataattctact

SEQ ID NO: 21394 - DNA, 22 bp, Artificial Sequence
  Target B2M Sequence complement
gatcttctttataattctactt

SEQ ID NO: 21395 - DNA, 22 bp, Artificial Sequence
  Target B2M Sequence complement
atcttctttataattctacttt

SEQ ID NO: 21396 - DNA, 22 bp, Artificial Sequence
  Target B2M Sequence complement
tcttctttataattctactttg

SEQ ID NO: 21397 - DNA, 22 bp, Artificial Sequence
  Target B2M Sequence complement
cttctttataattctactttga

SEQ ID NO: 21398 - DNA, 22 bp, Artificial Sequence
  Target B2M Sequence complement
ttctttataattctactttgag

SEQ ID NO: 21399 - DNA, 22 bp, Artificial Sequence
  Target B2M Sequence complement
tctttataattctactttgagt

SEQ ID NO: 21400 - DNA, 22 bp, Artificial Sequence
  Target B2M Sequence complement
ccacaggtagctctaggagggc

SEQ ID NO: 21401 - DNA, 22 bp, Artificial Sequence
  Target B2M Sequence complement
caggtagctctaggagggctgg

SEQ ID NO: 21402 - DNA, 22 bp, Artificial Sequence
  Target B2M Sequence complement
aggtagctctaggagggctggc

SEQ ID NO: 21403 - DNA, 22 bp, Artificial Sequence
  Target B2M Sequence complement
ggtagctctaggagggctggca

SEQ ID NO: 21404 - DNA, 22 bp, Artificial Sequence
  Target B2M Sequence complement
gggctggcaacttagaggtggg

SEQ ID NO: 21405 - DNA, 22 bp, Artificial Sequence
  Target B2M Sequence complement
ggctggcaacttagaggtgggg

SEQ ID NO: 21406 - DNA, 22 bp, Artificial Sequence
  Target B2M Sequence complement
ataagttaacttccaatttaca

SEQ ID NO: 21407 - DNA, 22 bp, Artificial Sequence
  Target B2M Sequence complement
taagttaacttccaatttacat

SEQ ID NO: 21408 - DNA, 22 bp, Artificial Sequence
  Target B2M Sequence complement
aagttaacttccaatttacata

SEQ ID NO: 21409 - DNA, 22 bp, Artificial Sequence
  Target B2M Sequence complement
ggggaaaatttagaaatataat

SEQ ID NO: 21410 - DNA, 22 bp, Artificial Sequence
  Target B2M Sequence complement
gggaaaatttagaaatataatt

SEQ ID NO: 21411 - DNA, 22 bp, Artificial Sequence
  Target B2M Sequence complement
ggaaaatttagaaatataattg

SEQ ID NO: 21412 - DNA, 22 bp, Artificial Sequence
  Target B2M Sequence complement
gaaaatttagaaatataattga

SEQ ID NO: 21413 - DNA, 22 bp, Artificial Sequence
  Target B2M Sequence complement
aaaatttagaaatataattgac

SEQ ID NO: 21414 - DNA, 22 bp, Artificial Sequence
  Target B2M Sequence complement
aaatttagaaatataattgaca

SEQ ID NO: 21415 - DNA, 22 bp, Artificial Sequence
  Target B2M Sequence complement
aatttagaaatataattgacag

SEQ ID NO: 21416 - DNA, 22 bp, Artificial Sequence
  Target B2M Sequence complement
atttagaaatataattgacagg

SEQ ID NO: 21417 - DNA, 22 bp, Artificial Sequence
  Target B2M Sequence complement
tttagaaatataattgacagga

SEQ ID NO: 21418 - DNA, 22 bp, Artificial Sequence
  Target B2M Sequence complement
ttagaaatataattgacaggat

SEQ ID NO: 21419 - DNA, 22 bp, Artificial Sequence
  Target B2M Sequence complement
tagaaatataattgacaggatt

SEQ ID NO: 21420 - DNA, 22 bp, Artificial Sequence
  Target B2M Sequence complement
agaaatataattgacaggatta

SEQ ID NO: 21421 - DNA, 22 bp, Artificial Sequence
  Target B2M Sequence complement
gaaatataattgacaggattat

SEQ ID NO: 21422 - DNA, 22 bp, Artificial Sequence
  Target B2M Sequence complement
aaatataattgacaggattatt

SEQ ID NO: 21423 - DNA, 22 bp, Artificial Sequence
  Target B2M Sequence complement
aatataattgacaggattattg

SEQ ID NO: 21424 - DNA, 22 bp, Artificial Sequence
  Target B2M Sequence complement
aggattattggaaatttgttat

SEQ ID NO: 21425 - DNA, 22 bp, Artificial Sequence
  Target B2M Sequence complement
ggattattggaaatttgttata

SEQ ID NO: 21426 - DNA, 22 bp, Artificial Sequence
  Target B2M Sequence complement
gattattggaaatttgttataa

SEQ ID NO: 21427 - DNA, 22 bp, Artificial Sequence
  Target B2M Sequence complement
attattggaaatttgttataat

SEQ ID NO: 21428 - DNA, 22 bp, Artificial Sequence
  Target B2M Sequence complement
ttattggaaatttgttataatg

SEQ ID NO: 21429 - DNA, 22 bp, Artificial Sequence
  Target B2M Sequence complement
tattggaaatttgttataatga

SEQ ID NO: 21430 - DNA, 22 bp, Artificial Sequence
  Target B2M Sequence complement
attggaaatttgttataatgaa

SEQ ID NO: 21431 - DNA, 22 bp, Artificial Sequence
  Target B2M Sequence complement
ttggaaatttgttataatgaat

SEQ ID NO: 21432 - DNA, 22 bp, Artificial Sequence
  Target B2M Sequence complement
tggaaatttgttataatgaatg

SEQ ID NO: 21433 - DNA, 22 bp, Artificial Sequence
  Target B2M Sequence complement
ggaaatttgttataatgaatga

SEQ ID NO: 21434 - DNA, 22 bp, Artificial Sequence
  Target B2M Sequence complement
gaaatttgttataatgaatgaa

SEQ ID NO: 21435 - DNA, 22 bp, Artificial Sequence
  Target B2M Sequence complement
aaatttgttataatgaatgaaa

SEQ ID NO: 21436 - DNA, 22 bp, Artificial Sequence
  Target B2M Sequence complement
aatttgttataatgaatgaaac

SEQ ID NO: 21437 - DNA, 22 bp, Artificial Sequence
  Target B2M Sequence complement
atttgttataatgaatgaaaca

SEQ ID NO: 21438 - DNA, 22 bp, Artificial Sequence
  Target B2M Sequence complement
tttgttataatgaatgaaacat

SEQ ID NO: 21439 - DNA, 22 bp, Artificial Sequence
  Target B2M Sequence complement
ttgttataatgaatgaaacatt

SEQ ID NO: 21440 - DNA, 22 bp, Artificial Sequence
  Target B2M Sequence complement
tgttataatgaatgaaacattt

SEQ ID NO: 21441 - DNA, 22 bp, Artificial Sequence
  Target B2M Sequence complement
gttataatgaatgaaacatttt

SEQ ID NO: 21442 - DNA, 22 bp, Artificial Sequence
  Target B2M Sequence complement
ttataatgaatgaaacattttg

SEQ ID NO: 21443 - DNA, 22 bp, Artificial Sequence
  Target B2M Sequence complement
tataatgaatgaaacattttgt

SEQ ID NO: 21444 - DNA, 22 bp, Artificial Sequence
  Target B2M Sequence complement
ataatgaatgaaacattttgtc

SEQ ID NO: 21445 - DNA, 22 bp, Artificial Sequence
  Target B2M Sequence complement
taatgaatgaaacattttgtca

SEQ ID NO: 21446 - DNA, 22 bp, Artificial Sequence
  Target B2M Sequence complement
aatgaatgaaacattttgtcat

SEQ ID NO: 21447 - DNA, 22 bp, Artificial Sequence
  Target B2M Sequence complement
atgaatgaaacattttgtcata

SEQ ID NO: 21448 - DNA, 22 bp, Artificial Sequence
  Target B2M Sequence complement
tgaatgaaacattttgtcatat

SEQ ID NO: 21449 - DNA, 22 bp, Artificial Sequence
  Target B2M Sequence complement
gaatgaaacattttgtcatata

SEQ ID NO: 21450 - DNA, 22 bp, Artificial Sequence
  Target B2M Sequence complement
aatgaaacattttgtcatataa

SEQ ID NO: 21451 - DNA, 22 bp, Artificial Sequence
  Target B2M Sequence complement
atgaaacattttgtcatataag

SEQ ID NO: 21452 - DNA, 22 bp, Artificial Sequence
  Target B2M Sequence complement
tgaaacattttgtcatataaga

SEQ ID NO: 21453 - DNA, 22 bp, Artificial Sequence
  Target B2M Sequence complement
gaaacattttgtcatataagat

SEQ ID NO: 21454 - DNA, 22 bp, Artificial Sequence
  Target B2M Sequence complement
aaacattttgtcatataagatt

SEQ ID NO: 21455 - DNA, 22 bp, Artificial Sequence
  Target B2M Sequence complement
aacattttgtcatataagattc

SEQ ID NO: 21456 - DNA, 22 bp, Artificial Sequence
  Target B2M Sequence complement
acattttgtcatataagattca

SEQ ID NO: 21457 - DNA, 22 bp, Artificial Sequence
  Target B2M Sequence complement
cattttgtcatataagattcat

SEQ ID NO: 21458 - DNA, 22 bp, Artificial Sequence
  Target B2M Sequence complement
attttgtcatataagattcata

SEQ ID NO: 21459 - DNA, 22 bp, Artificial Sequence
  Target B2M Sequence complement
ttttgtcatataagattcatat

SEQ ID NO: 21460 - DNA, 22 bp, Artificial Sequence
  Target B2M Sequence complement
tttgtcatataagattcatatt

SEQ ID NO: 21461 - DNA, 22 bp, Artificial Sequence
  Target B2M Sequence complement
ttgtcatataagattcatattt

SEQ ID NO: 21462 - DNA, 22 bp, Artificial Sequence
  Target B2M Sequence complement
tgtcatataagattcatattta

SEQ ID NO: 21463 - DNA, 22 bp, Artificial Sequence
  Target B2M Sequence complement
gtcatataagattcatatttac

SEQ ID NO: 21464 - DNA, 22 bp, Artificial Sequence
  Target B2M Sequence complement
tcatataagattcatatttact

SEQ ID NO: 21465 - DNA, 22 bp, Artificial Sequence
  Target B2M Sequence complement
catataagattcatatttactt

SEQ ID NO: 21466 - DNA, 22 bp, Artificial Sequence
  Target B2M Sequence complement
atataagattcatatttacttc

SEQ ID NO: 21467 - DNA, 22 bp, Artificial Sequence
  Target B2M Sequence complement
tataagattcatatttacttct

SEQ ID NO: 21468 - DNA, 22 bp, Artificial Sequence
  Target B2M Sequence complement
ataagattcatatttacttctt

SEQ ID NO: 21469 - DNA, 22 bp, Artificial Sequence
  Target B2M Sequence complement
taagattcatatttacttctta

SEQ ID NO: 21470 - DNA, 22 bp, Artificial Sequence
  Target B2M Sequence complement
aagattcatatttacttcttat

SEQ ID NO: 21471 - DNA, 22 bp, Artificial Sequence
  Target B2M Sequence complement
agattcatatttacttcttata

SEQ ID NO: 21472 - DNA, 22 bp, Artificial Sequence
  Target B2M Sequence complement
gattcatatttacttcttatac

SEQ ID NO: 21473 - DNA, 22 bp, Artificial Sequence
  Target B2M Sequence complement
attcatatttacttcttataca

SEQ ID NO: 21474 - DNA, 22 bp, Artificial Sequence
  Target B2M Sequence complement
ttcatatttacttcttatacat

SEQ ID NO: 21475 - DNA, 22 bp, Artificial Sequence
  Target B2M Sequence complement
tcatatttacttcttatacatt

SEQ ID NO: 21476 - DNA, 22 bp, Artificial Sequence
  Target B2M Sequence complement
catatttacttcttatacattt

SEQ ID NO: 21477 - DNA, 22 bp, Artificial Sequence
  Target B2M Sequence complement
atatttacttcttatacatttg

SEQ ID NO: 21478 - DNA, 22 bp, Artificial Sequence
  Target B2M Sequence complement
tatttacttcttatacatttga

SEQ ID NO: 21479 - DNA, 22 bp, Artificial Sequence
  Target B2M Sequence complement
atttacttcttatacatttgat

SEQ ID NO: 21480 - DNA, 22 bp, Artificial Sequence
  Target B2M Sequence complement
tttacttcttatacatttgata

SEQ ID NO: 21481 - DNA, 22 bp, Artificial Sequence
  Target B2M Sequence complement
ttacttcttatacatttgataa

SEQ ID NO: 21482 - DNA, 22 bp, Artificial Sequence
  Target B2M Sequence complement
tacttcttatacatttgataaa

SEQ ID NO: 21483 - DNA, 22 bp, Artificial Sequence
  Target B2M Sequence complement
acttcttatacatttgataaag

SEQ ID NO: 21484 - DNA, 22 bp, Artificial Sequence
  Target B2M Sequence complement
cttcttatacatttgataaagt

SEQ ID NO: 21485 - DNA, 22 bp, Artificial Sequence
  Target B2M Sequence complement
ttcttatacatttgataaagta

SEQ ID NO: 21486 - DNA, 22 bp, Artificial Sequence
  Target B2M Sequence complement
tcttatacatttgataaagtaa

SEQ ID NO: 21487 - DNA, 22 bp, Artificial Sequence
  Target B2M Sequence complement
cttatacatttgataaagtaag

SEQ ID NO: 21488 - DNA, 22 bp, Artificial Sequence
  Target B2M Sequence complement
ttatacatttgataaagtaagg

SEQ ID NO: 21489 - DNA, 22 bp, Artificial Sequence
  Target B2M Sequence complement
gttaatctggtttatttttgtt

SEQ ID NO: 21490 - DNA, 22 bp, Artificial Sequence
  Target B2M Sequence complement
ttaatctggtttatttttgttc

SEQ ID NO: 21491 - DNA, 22 bp, Artificial Sequence
  Target B2M Sequence complement
tttatttttgttccacaagtta

SEQ ID NO: 21492 - DNA, 22 bp, Artificial Sequence
  Target B2M Sequence complement
ttatttttgttccacaagttaa

SEQ ID NO: 21493 - DNA, 22 bp, Artificial Sequence
  Target B2M Sequence complement
tatttttgttccacaagttaaa

SEQ ID NO: 21494 - DNA, 22 bp, Artificial Sequence
  Target B2M Sequence complement
atttttgttccacaagttaaat

SEQ ID NO: 21495 - DNA, 22 bp, Artificial Sequence
  Target B2M Sequence complement
tttttgttccacaagttaaata

SEQ ID NO: 21496 - DNA, 22 bp, Artificial Sequence
  Target B2M Sequence complement
ttttgttccacaagttaaataa

SEQ ID NO: 21497 - DNA, 22 bp, Artificial Sequence
  Target B2M Sequence complement
tttgttccacaagttaaataaa

SEQ ID NO: 21498 - DNA, 22 bp, Artificial Sequence
  Target B2M Sequence complement
ttgttccacaagttaaataaat

SEQ ID NO: 21499 - DNA, 22 bp, Artificial Sequence
  Target B2M Sequence complement
ttccacaagttaaataaatcat

SEQ ID NO: 21500 - DNA, 22 bp, Artificial Sequence
  Target B2M Sequence complement
tccacaagttaaataaatcata

SEQ ID NO: 21501 - DNA, 22 bp, Artificial Sequence
  Target B2M Sequence complement
ccacaagttaaataaatcataa

SEQ ID NO: 21502 - DNA, 22 bp, Artificial Sequence
  Target B2M Sequence complement
cacaagttaaataaatcataaa

SEQ ID NO: 21503 - DNA, 22 bp, Artificial Sequence
  Target B2M Sequence complement
acaagttaaataaatcataaaa

SEQ ID NO: 21504 - DNA, 22 bp, Artificial Sequence
  Target B2M Sequence complement
caagttaaataaatcataaaac

SEQ ID NO: 21505 - DNA, 22 bp, Artificial Sequence
  Target B2M Sequence complement
aagttaaataaatcataaaact

SEQ ID NO: 21506 - DNA, 22 bp, Artificial Sequence
  Target B2M Sequence complement
agttaaataaatcataaaactt

SEQ ID NO: 21507 - DNA, 22 bp, Artificial Sequence
  Target B2M Sequence complement
gttaaataaatcataaaacttg

SEQ ID NO: 21508 - DNA, 22 bp, Artificial Sequence
  Target B2M Sequence complement
ttaaataaatcataaaacttga

SEQ ID NO: 21509 - protein, 32 aa, Artificial Sequence; identical to SEQ ID NO: 8356
  Hinge (truncated)

SEQ ID NO: 21510 - protein, 239 aa, Artificial Sequence
  MSLN scFv domain
QVQLQQSGPELEKPGASVKISCKASGYSFTGYTMNWVKQSHGKSLEWIGLITPYNGASSYNQKFRGKATLTVDKSSSTAYMDLLSLTSEDSAVYFCARGGYDGRGFDYWGQGTTVTVSSGGGGSGGGGSGGGGSDIELTQSPAIMSASPGEKVTMTCSASSSVSYMHWYQQKSGTSPKRWIYDTSKLASGVPGRFSGSGSGNSYSLTISSVEAEDDATYYCQQWSGYPLTFGAGTKLEI

SEQ ID NO: 21511 - protein, 245 aa, Artificial Sequence
  MSLN scFv domain
EVQLVESGGGLVKPGGSLRLSCAASGFTFSNAWMSWVRQAPGKGLEWVGRIKSKTDGGTTDYAAPVKGRFTISRDDSKNTLYLQMNSLKTEDTAVYYCTTDLPKLRNFHIWGQGTLVTVSSGGGGSGGGGSGGGGSGGDIQMTQSPSSLSASVGDRVTITCRASQSISSYLNWYQQKPGKAPKLLIYAASSLQSGVPSRFSGSGSGTDFTLTISSLQPEDFATYYCQQSYSTPLTFGGGTKVEIK

SEQ ID NO: 21512 - protein, 248 aa, Artificial Sequence
  MSLN scFv domain
EVQLVESGGGLVQPGGSLRLSCAASGFTFSSYAMHWVRQAPGKGLEYVSAISSNGGSTYYANSVKGRFTISRDNSKNTLYLQMGSLRAEDMAVYYCASLEYHGFRQYGLRYWHWGQGTLVTVSSGGGGSGGGGSGGGGSGGDIQMTQSPSSLSASVGDRVTITCRASQSISSYLNWYQQKPGKAPKLLIYAASSLQSGVPSRFSGSGSGTDFTLTISSLQPEDFATYYCQQSYSTPLTFGGGTKVEIK

SEQ ID NO: 21513 - protein, 247 aa, Artificial Sequence
  MSLN scFv domain
QLQLQESGSGLVKPSQTLSLTCAVSGGSISSGGYSWSWIRQPPGKGLEWIGYIYHSGSTYYNPSLKSRVTISVDRSKNQFSLKLSSVTAADTAVYYCASIKFWFAGINYFFPWGQGTLVTVSSGGGGSGGGGSGGGGSGGDIQMTQSPSSLSASVGDRVTITCRASQSISSYLNWYQQKPGKAPKLLIYAASSLQSGVPSRFSGSGSGTDFTLTISSLQPEDFATYYCQQSYSTPLTFGGGTKVEIK

SEQ ID NO: 21514 - protein, 243 aa, Artificial Sequence
  MSLN scFv domain
EVQLVESGGGLVQPGGSLRLSCAASGFTFSSYWMHWVRQAPGKGLVWVSRINSDGSSTSYADSVKGRFTISRDNAKNTLYLQMNSLRAEDTAVYYCASGFLGMGSNFIWGQGTLVTVSSGGGGSGGGGSGGGGSGGDIQMTQSPSSLSASVGDRVTITCRASQSISSYLNWYQQKPGKAPKLLIYAASSLQSGVPSRFSGSGSGTDFTLTISSLQPEDFATYYCQQSYSTPLTFGGGTKVEIK

SEQ ID NO: 21515 - protein, 243 aa, Artificial Sequence
  MSLN scFv domain
QVQLQESGPGLVKPSQTLSLTCTVSGGSISSGGYYWSWIRQHPGKGLEWIGYIYYSGSTYYNPSLKSLVTISVDTSKNQFSLKLSSVTAADTAVYYCASGDRARYFDLWGRGTLVTVSSGGGGSGGGGSGGGGSGGDIQMTQSPSSLSASVGDRVTITCRASQSISSYLNWYQQKPGKAPKLLIYAASSLQSGVPSRFSGSGSGTDFTLTISSLQPEDFATYYCQQSYSTPLTFGGGTKVEIK

SEQ ID NO: 21516 - protein, 247 aa, Artificial Sequence
  MSLN scFv domain
EVQLVESGGGLVQPGGSLRLSCAASGFTFSSYWMHWVRQAPGKGLVWVSRINSDGSSTSYADSVKGRFTISRDNAKNTLYLQMNSLRAEDTAVYYCARYPRGYHQMVDAFDIWGQGTMVTVSSGGGGSGGGGSGGGGSGGDIQMTQSPSSLSASVGDRVTITCRASQSISSYLNWYQQKPGKAPKLLIYAASSLQSGVPSRFSGSGSGTDFTLTISSLQPEDFATYYCQQSYSTPLTFGGGTKVEIK

SEQ ID NO: 21517 - protein, 250 aa, Artificial Sequence
  MSLN scFv domain
QLQLQESGPGLVKPSETLSLTCTVSGGSISSSSYYWGWIRQPPGKGLEWIGSIYYSGSTYYNPSLKSRVTISVDTSKNQFSLKLSSVTAADTAVYYCARVRFLAARTTIPEANFLWGQGTLVTVSSGGGGSGGGGSGGGGSGGDIQMTQSPSSLSASVGDRVTITCRASQSISSYLNWYQQKPGKAPKLLIYAASSLQSGVPSRFSGSGSGTDFTLTISSLQPEDFATYYCQQSYSTPLTFGGGTKVEIK

SEQ ID NO: 21518 - protein, 242 aa, Artificial Sequence
  MSLN scFv domain
EVQLVESGGGLVQPGGSLRLSCAASGFTFSSYSMNWVRQAPGKGLEWVSYISSSSSTIYYADSVKGRFTISRDNAKNSLYLQMNSLRAEDTAVYYCARVLSRARFDYWGQGTLVTVSSGGGGSGGGGSGGGGSGGDIQMTQSPSSLSASVGDRVTITCRASQSISSYLNWYQQKPGKAPKLLIYAASSLQSGVPSRFSGSGSGTDFTLTISSLQPEDFATYYCQQSYSTPLTFGGGTKVEIK

SEQ ID NO: 21519 - protein, 241 aa, Artificial Sequence
  MSLN scFv domain
EVQLVESGGGLVKPGGSLRLSCAASGFTFSSYSMNWVRQAPGKGLEWVSSISSSSSYIYYADSVKGRFTISRDNAKNSLYLQMNSLRAEDTAVYYCARLRGRVFDPWGQGTLVTVSSGGGGSGGGGSGGGGSGGDIQMTQSPSSLSASVGDRVTITCRASQSISSYLNWYQQKPGKAPKLLIYAASSLQSGVPSRFSGSGSGTDFTLTISSLQPEDFATYYCQQSYSTPLTFGGGTKVEIK

SEQ ID NO: 21520 - protein, 247 aa, Artificial Sequence
  MSLN scFv domain
QLQLQESGPGLVKPSETLSLTCTVSGGSISSSSYYWGWIRQPPGKGLEWIGSIYYSGSTYYNPSLKSRVTISVDTSKNQFSLKLSSVTAADTAVYYCARIKFTSFLYVHGFLWGQGTLVTVSSGGGGSGGGGSGGGGSGGDIQMTQSPSSLSASVGDRVTITCRASQSISSYLNWYQQKPGKAPKLLIYAASSLQSGVPSRFSGSGSGTDFTLTISSLQPEDFATYYCQQSYSTPLTFGGGTKVEIK

SEQ ID NO: 21521 - protein, 246 aa, Artificial Sequence
  MSLN scFv domain
QVQLVQSGAEVKKPGASVKVSCKASGYTFTSYAMHWVRQAPGQRLEWMGWINAGNGNTKYSQKFQGRVTITRDTSASTAYMELSSLRSEDTAVYYCARGQRWLYLGGIRRHWGQGTLVTVSSGGGGSGGGGSGGGGSGGDIQMTQSPSSLSASVGDRVTITCRASQSISSYLNWYQQKPGKAPKLLIYAASSLQSGVPSRFSGSGSGTDFTLTISSLQPEDFATYYCQQSYSTPLTFGGGTKVEIK

SEQ ID NO: 21522 - protein, 244 aa, Artificial Sequence
  MSLN scFv domain
QVQLQESGPGLVKPSETLSLTCTVSGGSISSYYWSWIRQPPGKGLEWIGYIYYSGSTNYNPSLKSRVTISVDTSKNQFSLKLSSVTAADTAVYYCAREWIPSRPYYFDYWGQGTLVTVSSGGGGSGGGGSGGGGSGGDIQMTQSPSSLSASVGDRVTITCRASQSISSYLNWYQQKPGKAPKLLIYAASSLQSGVPSRFSGSGSGTDFTLTISSLQPEDFATYYCQQSYSTPLTFGGGTKVEIK

SEQ ID NO: 21523 - protein, 244 aa, Artificial Sequence
  MSLN scFv domain
QVQLQESGPGLVKPSQTLSLTCTVSGGSISSGGYYWSWIRQPPGKGLEWIGYIYYSGSTYYNPSLKSRVTISVDTSKNQFSLKLSSVTAADTAVYYCARESTGTGAFDIWGQGTMVTVSSGGGGSGGGGSGGGGSGGDIQMTQSPSSLSASVGDRVTITCRASQSISSYLNWYQQKPGKAPKLLIYAASSLQSGVPSRFSGSGSGTDFTLTISSLQPEDFATYYCQQSYSTPLTFGGGTKVEIK

SEQ ID NO: 21524 - protein, 246 aa, Artificial Sequence
  MSLN scFv domain
EVQLVESGGGVVRPGGSLRLSCAASGFTFDDYGMSWVRQAPGKGLEWVSGINWNGGSTGYADSVKGRFTISRDNAKNSLYLQMNSLRAEDTALYHCARERYRRVLHWYFDLWGRGTLVTVSSGGGGSGGGGSGGGGSGGDIQMTQSPSSLSASVGDRVTITCRASQSISSYLNWYQQKPGKAPKLLIYAASSLQSGVPSRFSGSGSGTDFTLTISSLQPEDFATYYCQQSYSTPLTFGGGTKVEIK

SEQ ID NO: 21525 - protein, 240 aa, Artificial Sequence
  MSLN scFv domain
QVQLVQSGAEVKKPGASVKVSCKASGYTFTSYDINWVRQATGQGLEWMGWMNPNSGNTGYAQKFQGRVTMTRNTSISTAYMELSSLRSEDTAVYYCAREPDAFDIWGQGTMVTVSSGGGGSGGGGSGGGGSGGDIQMTQSPSSLSASVGDRVTITCRASQSISSYLNWYQQKPGKAPKLLIYAASSLQSGVPSRFSGSGSGTDFTLTISSLQPEDFATYYCQQSYSTPLTFGGGTKVEIK

SEQ ID NO: 21526 - protein, 246 aa, Artificial Sequence
  MSLN scFv domain
QVQLQESGPGLVKPSQTLSLTCTVSGGSISSGGYYWSWIRQPPGKGLEWIGYIYYSGSTYYNPSLKSRVTISVDTSKNQFSLKLSSVTAADTAVYYCAREHMGTIPYYFDYWGQGTLVTVSSGGGGSGGGGSGGGGSGGDIQMTQSPSSLSASVGDRVTITCRASQSISSYLNWYQQKPGKAPKLLIYAASSLQSGVPSRFSGSGSGTDFTLTISSLQPEDFATYYCQQSYSTPLTFGGGTKVEIK

SEQ ID NO: 21527 - protein, 244 aa, Artificial Sequence
  MSLN scFv domain
QVQLQESGPGLVKPSQTLSLTCTVSGGSISSGGYYWSWIRQPPGKGLEWIGYIYYSGSTYYNPSLKSRVTISVDTSKNQFSLKLSSVTAADTAVYYCAREEFGYGDVLYWGQGTLVTVSSGGGGSGGGGSGGGGSGGDIQMTQSPSSLSASVGDRVTITCRASQSISSYLNWYQQKPGKAPKLLIYAASSLQSGVPSRFSGSGSGTDFTLTISSLQPEDFATYYCQQSYSTPLTFGGGTKVEIK

SEQ ID NO: 21528 - protein, 244 aa, Artificial Sequence
  MSLN scFv domain
QVQLQESGPGLVKPSQTLSLTCTVSGGSISSGDYYWSWIRQPPGKGLEWIGYIYYSGSTYYNPSLKSRVTISVDTSKNQFSLKLSSVTAADTAVYYCAREDVVKGAFDIWGQGTMVTVSSGGGGSGGGGSGGGGSGGDIQMTQSPSSLSASVGDRVTITCRASQSISSYLNWYQQKPGKAPKLLIYAASSLQSGVPSRFSGSGSGTDFTLTISSLQPEDFATYYCQQSYSTPLTFGGGTKVEIK

SEQ ID NO: 21529 - protein, 245 aa, Artificial Sequence
  MSLN scFv domain
EVQLVESGGGLVQPGGSLRLSCAASGFTFSSYSMNWVRQAPGKGLEWVSYISSSSSTIYYADSVKGRFTISRDNAKNSLYLQMNSLRAEDTAVYYCAREDFSHKLGYFQHWGQGTLVTVSSGGGGSGGGGSGGGGSGGDIQMTQSPSSLSASVGDRVTITCRASQSISSYLNWYQQKPGKAPKLLIYAASSLQSGVPSRFSGSGSGTDFTLTISSLQPEDFATYYCQQSYSTPLTFGGGTKVEIK

SEQ ID NO: 21530 - protein, 238 aa, Artificial Sequence
  MSLN scFv domain
QVQLVESGGGLVKPGGSLRLSCAASGFTFSDYYMSWIRQAPGKGLEWVSYISSSGSTIYYADSVKGRFTISRDNAKNSLYLQMNSLRAEDTAVYYCARDYDYVWGQGTLVTVSSGGGGSGGGGSGGGGSGGDIQMTQSPSSLSASVGDRVTITCRASQSISSYLNWYQQKPGKAPKLLIYAASSLQSGVPSRFSGSGSGTDFTLTISSLQPEDFATYYCQQSYSTPLTFGGGTKVEIK

SEQ ID NO: 21531 - protein, 244 aa, Artificial Sequence
  MSLN scFv domain
QVQLQESGPGLVKPSQTLSLTCTVSGGSISSGDYYWSWIRQPPGKGLEWIGYIYYSGSTYYNPSLKSRVTISVDTSKNQFSLKLSSVTAADTAVYYCARDRRDWDWFDPWGQGTLVTVSSGGGGSGGGGSGGGGSGGDIQMTQSPSSLSASVGDRVTITCRASQSISSYLNWYQQKPGKAPKLLIYAASSLQSGVPSRFSGSGSGTDFTLTISSLQPEDFATYYCQQSYSTPLTFGGGTKVEIK

SEQ ID NO: 21532 - protein, 243 aa, Artificial Sequence
  MSLN scFv domain
QVQLQESGPGLVKPSGTLSLTCAVSGGSISSSNWWSWVRQPPGKGLEWIGEIYHSGSTNYNPSLKSRVTISVDKSKNQFSLKLSSVTAADTAVYYCARDQQALKYRVDWGQGTLVTVSSGGGGSGGGGSGGGGSGGDIQMTQSPSSLSASVGDRVTITCRASQSISSYLNWYQQKPGKAPKLLIYAASSLQSGVPSRFSGSGSGTDFTLTISSLQPEDFATYYCQQSYSTPLTFGGGTKVEIK

SEQ ID NO: 21533 - protein, 242 aa, Artificial Sequence
  MSLN scFv domain
QVQLVQSGAEVKKPGASVKVSCKASGYTFTSYGISWVRQAPGQGLEWMGWISAYNGNTNYAQKLQGRVTMTTDTSTSTAYMELRSLRSDDTAVYYCARDLTLGCFDYWGQGTLVTVSSGGGGSGGGGSGGGGSGGDIQMTQSPSSLSASVGDRVTITCRASQSISSYLNWYQQKPGKAPKLLIYAASSLQSGVPSRFSGSGSGTDFTLTISSLQPEDFATYYCQQSYSTPLTFGGGTKVEIK

SEQ ID NO: 21534 - protein, 242 aa, Artificial Sequence
  MSLN scFv domain
EVQLVESGGGLVQPGGSLRLSCAASGFTVSSNYMSWVRQAPGKGLEWVSVIYSGGSTYYADSVKGRFTISRDNSKNTLYLQMNSLRAEDTAVYYCARDGSNSWYFDLWGRGTLVTVSSGGGGSGGGGSGGGGSGGDIQMTQSPSSLSASVGDRVTITCRASQSISSYLNWYQQKPGKAPKLLIYAASSLQSGVPSRFSGSGSGTDFTLTISSLQPEDFATYYCQQSYSTPLTFGGGTKVEIK

SEQ ID NO: 21535 - protein, 242 aa, Artificial Sequence
  MSLN scFv domain
QVQLVESGGGVVQPGRSLRLSCAASGFTFSSYGMHWVRQAPGKGLEWVAVIWYDGSNKYYADSVKGRFTISRDNSKNTLYLQMNSLRAEDTAVYYCARAFLFLSFSVWGQGTLVTVSSGGGGSGGGGSGGGGSGGDIQMTQSPSSLSASVGDRVTITCRASQSISSYLNWYQQKPGKAPKLLIYAASSLQSGVPSRFSGSGSGTDFTLTISSLQPEDFATYYCQQSYSTPLTFGGGTKVEIK

SEQ ID NO: 21536 - protein, 245 aa, Artificial Sequence
  MSLN scFv domain
EVQLVESGGVVVQPGGSLRLSCAASGFTFDDYTMHWVRQAPGKGLEWVSLISWDGGSTYYADSVKGRFTISRDNSKNSLYLQMNSLRTEDTALYYCAKGIFYSSKEDFDYWGQGTLVTVSSGGGGSGGGGSGGGGSGGDIQMTQSPSSLSASVGDRVTITCRASQSISSYLNWYQQKPGKAPKLLIYAASSLQSGVPSRFSGSGSGTDFTLTISSLQPEDFATYYCQQSYSTPLTFGGGTKVEIK

SEQ ID NO: 21537 - protein, 248 aa, Artificial Sequence
  MSLN scFv domain
EVQLVESGGVVVQPGGSLRLSCAASGFTFDDYTMHWVRQAPGKGLEWVSLISWDGGSTYYADSVKGRFTISRDNSKNSLYLQMNSLRTEDTALYYCAKDIWIFYSSNPKPTVYWGQGTLVTVSSGGGGSGGGGSGGGGSGGDIQMTQSPSSLSASVGDRVTITCRASQSISSYLNWYQQKPGKAPKLLIYAASSLQSGVPSRFSGSGSGTDFTLTISSLQPEDFATYYCQQSYSTPLTFGGGTKVEIK

SEQ ID NO: 21538 - protein, 246 aa, Artificial Sequence
  MSLN scFv domain
QVQLVQSGSELKKPGASVKVSCKASGYTFTSYAMNWVRQAPGQGLEWMGWINTNTGNPTYAQGFTGRFVFSFDTSVSTAYLQICSLKAEDTAVYYCARKDQTLTYGNWFDPWGQGTLVTVSSGGGGSGGGGSGGGGSGGDIQMTQSPSSLSASVGDRVTITCRASQSISSYLNWYQQKPGKAPKLLIYAASSLQSGVPSRFSGSGSGTDFTLTISSLQPEDFATYYCQQSYSTPLTFGGGTKVEIK

SEQ ID NO: 21539 - protein, 242 aa, Artificial Sequence
  MSLN scFv domain
QVQLQESGPGLVKPSETLSLTCTVSGGSVSSGSYYWSWIRQPPGKGLEWIGYIYYSGSTNYNPSLKSRVTISVDTSKNQFSLKLSSVTAADTAVYYCARDHYERGLYWGQGTLVTVSSGGGGSGGGGSGGGGSGGDIQMTQSPSSLSASVGDRVTITCRASQSISSYLNWYQQKPGKAPKLLIYAASSLQSGVPSRFSGSGSGTDFTLTISSLQPEDFATYYCQQSYSTPLTFGGGTKVEIK

SEQ ID NO: 21540 - protein, 242 aa, Artificial Sequence
  MSLN scFv domain
QVQLVESGGGLVKPGGSLRLSCAASGFTFSDYYMSWIRQAPGKGLEWVSYISSSGSTIYYADSVKGRFTISRDNAKNSLYLQMNSLRAEDTAVYYCARYMYNWYFDLWGRGTLVTVSSGGGGSGGGGSGGGGSGGDIQMTQSPSSVSASVGDRVTITCRASQGISSWLAWYQQKPGKAPKLLIYAASSLQSGVPSRFSGSGSGTDFTLTISSLQPEDFATYYCQQANSFPLTFGGGTKVEIK

SEQ ID NO: 21541 - protein, 241 aa, Artificial Sequence
  MSLN scFv domain
QVQLVESGGGLVKPGGSLRLSCAASGFTFSDYYMSWIRQAPGKGLEWVSYISSSGSTIYYADSVKGRFTISRDNAKNSLYLQMNSLRAEDTAVYYCARDRRPAFDIWGQGTMVTVSSGGGGSGGGGSGGGGSGGDIQMTQSPSSVSASVGDRVTITCRASQGISSWLAWYQQKPGKAPKLLIYAASSLQSGVPSRFSGSGSGTDFTLTISSLQPEDFATYYCQQANSFPLTFGGGTKVEIK

SEQ ID NO: 21542 - protein, 243 aa, Artificial Sequence
  MSLN scFv domain
QVQLVESGGGLVKPGGSLRLSCAASGFTFSDYYMSWIRQAPGKGLEWVSYISSSGSTIYYADSVKGRFTISRDNAKNSLYLQMNSLRAEDTAVYYCAVHLKRRPYFDYWGQGTLVTVSSGGGGSGGGGSGGGGSGGAIQLTQSPSSLSASVGDRVTITCRASQGISSALAWYQQKPGKAPKLLIYDASSLESGVPSRFSGSGSGTDFTLTISSLQPEDFATYYCQQFNSYPLTFGGGTKVEIK

SEQ ID NO: 21543 - protein, 242 aa, Artificial Sequence
  MSLN scFv domain
QVQLVESGGGLVKPGGSLRLSCAASGFTFSDYYMSWIRQAPGKGLEWVSYISSSGSTIYYADSVKGRFTISRDNAKNSLYLQMNSLRAEDTAVYYCASVHKKPIFDYWGQGTLVTVSSGGGGSGGGGSGGGGSGGAIQLTQSPSSLSASVGDRVTITCRASQGISSALAWYQQKPGKAPKLLIYDASSLESGVPSRFSGSGSGTDFTLTISSLQPEDFATYYCQQFNSYPLTFGGGTKVEIK

SEQ ID NO: 21544 - protein, 242 aa, Artificial Sequence
  MSLN scFv domain
QVQLVESGGGLVKPGGSLRLSCAASGFTFSDYYMSWIRQAPGKGLEWVSYISSSGSTIYYADSVKGRFTISRDNAKNSLYLQMNSLRAEDTAVYYCASTSRRCTFQHWGQGTLVTVSSGGGGSGGGGSGGGGSGGAIQLTQSPSSLSASVGDRVTITCRASQGISSALAWYQQKPGKAPKLLIYDASSLESGVPSRFSGSGSGTDFTLTISSLQPEDFATYYCQQFNSYPLTFGGGTKVEIK

SEQ ID NO: 21545 - protein, 242 aa, Artificial Sequence
  MSLN scFv domain
QVQLVESGGGLVKPGGSLRLSCAASGFTFSDYYMSWIRQAPGKGLEWVSYISSSGSTIYYADSVKGRFTISRDNAKNSLYLQMNSLRAEDTAVYYCASTSPRPLFQHWGQGTLVTVSSGGGGSGGGGSGGGGSGGAIQLTQSPSSLSASVGDRVTITCRASQGISSALAWYQQKPGKAPKLLIYDASSLESGVPSRFSGSGSGTDFTLTISSLQPEDFATYYCQQFNSYPLTFGGGTKVEIK

SEQ ID NO: 21546 - protein, 244 aa, Artificial Sequence
  MSLN scFv domain
QVQLVESGGGLVKPGGSLRLSCAASGFTFSDYYMSWIRQAPGKGLEWVSYISSSGSTIYYADSVKGRFTISRDNAKNSLYLQMNSLRAEDTAVYYCASPYQVRGVYFDYWGQGTLVTVSSGGGGSGGGGSGGGGSGGAIQLTQSPSSLSASVGDRVTITCRASQGISSALAWYQQKPGKAPKLLIYDASSLESGVPSRFSGSGSGTDFTLTISSLQPEDFATYYCQQFNSYPLTFGGGTKVEIK

SEQ ID NO: 21547 - protein, 244 aa, Artificial Sequence
  MSLN scFv domain
QVQLVESGGGLVKPGGSLRLSCAASGFTFSDYYMSWIRQAPGKGLEWVSYISSSGSTIYYADSVKGRFTISRDNAKNSLYLQMNSLRAEDTAVYYCASPYKKRRTVFDYWGQGTLVTVSSGGGGSGGGGSGGGGSGGAIQLTQSPSSLSASVGDRVTITCRASQGISSALAWYQQKPGKAPKLLIYDASSLESGVPSRFSGSGSGTDFTLTISSLQPEDFATYYCQQFNSYPLTFGGGTKVEIK

SEQ ID NO: 21548 - protein, 243 aa, Artificial Sequence
  MSLN scFv domain
QVQLVESGGGLVKPGGSLRLSCAASGFTFSDYYMSWIRQAPGKGLEWVSYISSSGSTIYYADSVKGRFTISRDNAKNSLYLQMNSLRAEDTAVYYCASLQRGLALFQHWGQGTLVTVSSGGGGSGGGGSGGGGSGGAIQLTQSPSSLSASVGDRVTITCRASQGISSALAWYQQKPGKAPKLLIYDASSLESGVPSRFSGSGSGTDFTLTISSLQPEDFATYYCQQFNSYPLTFGGGTKVEIK

SEQ ID NO: 21549 - protein, 242 aa, Artificial Sequence
  MSLN scFv domain
QVQLVESGGGLVKPGGSLRLSCAASGFTFSDYYMSWIRQAPGKGLEWVSYISSSGSTIYYADSVKGRFTISRDNAKNSLYLQMNSLRAEDTAVYYCASILSVPYFDLWGRGTLVTVSSGGGGSGGGGSGGGGSGGAIQLTQSPSSLSASVGDRVTITCRASQGISSALAWYQQKPGKAPKLLIYDASSLESGVPSRFSGSGSGTDFTLTISSLQPEDFATYYCQQFNSYPLTFGGGTKVEIK

SEQ ID NO: 21550 - protein, 247 aa, Artificial Sequence
  MSLN scFv domain
QVQLVESGGGLVKPGGSLRLSCAASGFTFSDYYMSWIRQAPGKGLEWVSYISSSGSTIYYADSVKGRFTISRDNAKNSLYLQMNSLRAEDTAVYYCASGWIRVPLRLPLFQHWGQGTLVTVSSGGGGSGGGGSGGGGSGGAIQLTQSPSSLSASVGDRVTITCRASQGISSALAWYQQKPGKAPKLLIYDASSLESGVPSRFSGSGSGTDFTLTISSLQPEDFATYYCQQFNSYPLTFGGGTKVEIK

SEQ ID NO: 21551 - protein, 242 aa, Artificial Sequence
  MSLN scFv domain
QVQLVESGGGLVKPGGSLRLSCAASGFTFSDYYMSWIRQAPGKGLEWVSYISSSGSTIYYADSVKGRFTISRDNAKNSLYLQMNSLRAEDTAVYYCARVTIFAIFDIWGQGTMVTVSSGGGGSGGGGSGGGGSGGAIQLTQSPSSLSASVGDRVTITCRASQGISSALAWYQQKPGKAPKLLIYDASSLESGVPSRFSGSGSGTDFTLTISSLQPEDFATYYCQQFNSYPLTFGGGTKVEIK

SEQ ID NO: 21552 - protein, 243 aa, Artificial Sequence
  MSLN scFv domain
QVQLVESGGGLVKPGGSLRLSCAASGFTFSDYYMSWIRQAPGKGLEWVSYISSSGSTIYYADSVKGRFTISRDNAKNSLYLQMNSLRAEDTAVYYCARVGRGFVHFDLWGRGTLVTVSSGGGGSGGGGSGGGGSGGAIQLTQSPSSLSASVGDRVTITCRASQGISSALAWYQQKPGKAPKLLIYDASSLESGVPSRFSGSGSGTDFTLTISSLQPEDFATYYCQQFNSYPLTFGGGTKVEIK

SEQ ID NO: 21553 - protein, 244 aa, Artificial Sequence
  MSLN scFv domain
QVQLVESGGGLVKPGGSLRLSCAASGFTFSDYYMSWIRQAPGKGLEWVSYISSSGSTIYYADSVKGRFTISRDNAKNSLYLQMNSLRAEDTAVYYCARTSRGLCVLFDYWGQGTLVTVSSGGGGSGGGGSGGGGSGGAIQLTQSPSSLSASVGDRVTITCRASQGISSALAWYQQKPGKAPKLLIYDASSLESGVPSRFSGSGSGTDFTLTISSLQPEDFATYYCQQFNSYPLTFGGGTKVEIK

SEQ ID NO: 21554 - protein, 244 aa, Artificial Sequence
  MSLN scFv domain
QVQLVESGGGLVKPGGSLRLSCAASGFTFSDYYMSWIRQAPGKGLEWVSYISSSGSTIYYADSVKGRFTISRDNAKNSLYLQMNSLRAEDTAVYYCARSGPSSYWYFDLWGRGTLVTVSSGGGGSGGGGSGGGGSGGAIQLTQSPSSLSASVGDRVTITCRASQGISSALAWYQQKPGKAPKLLIYDASSLESGVPSRFSGSGSGTDFTLTISSLQPEDFATYYCQQFNSYPLTFGGGTKVEIK

SEQ ID NO: 21555 - protein, 244 aa, Artificial Sequence
  MSLN scFv domain
QVQLVESGGGLVKPGGSLRLSCAASGFTFSDYYMSWIRQAPGKGLEWVSYISSSGSTIYYADSVKGRFTISRDNAKNSLYLQMNSLRAEDTAVYYCARNIYMGGIWFDPWGQGTLVTVSSGGGGSGGGGSGGGGSGGAIQLTQSPSSLSASVGDRVTITCRASQGISSALAWYQQKPGKAPKLLIYDASSLESGVPSRFSGSGSGTDFTLTISSLQPEDFATYYCQQFNSYPLTFGGGTKVEIK

SEQ ID NO: 21556 - protein, 243 aa, Artificial Sequence
  MSLN scFv domain
QVQLVESGGGLVKPGGSLRLSCAASGFTFSDYYMSWIRQAPGKGLEWVSYISSSGSTIYYADSVKGRFTISRDNAKNSLYLQMNSLRAEDTAVYYCARLTVRTGAFDIWGQGTMVTVSSGGGGSGGGGSGGGGSGGAIQLTQSPSSLSASVGDRVTITCRASQGISSALAWYQQKPGKAPKLLIYDASSLESGVPSRFSGSGSGTDFTLTISSLQPEDFATYYCQQFNSYPLTFGGGTKVEIK

SEQ ID NO: 21557 - protein, 243 aa, Artificial Sequence
  MSLN scFv domain
QVQLVESGGGLVKPGGSLRLSCAASGFTFSDYYMSWIRQAPGKGLEWVSYISSSGSTIYYADSVKGRFTISRDNAKNSLYLQMNSLRAEDTAVYYCARLRTAHLDFDLWGRGTLVTVSSGGGGSGGGGSGGGGSGGAIQLTQSPSSLSASVGDRVTITCRASQGISSALAWYQQKPGKAPKLLIYDASSLESGVPSRFSGSGSGTDFTLTISSLQPEDFATYYCQQFNSYPLTFGGGTKVEIK

SEQ ID NO: 21558 - protein, 243 aa, Artificial Sequence
  MSLN scFv domain
QVQLVESGGGLVKPGGSLRLSCAASGFTFSDYYMSWIRQAPGKGLEWVSYISSSGSTIYYADSVKGRFTISRDNAKNSLYLQMNSLRAEDTAVYYCARDLIFPVVFDYWGQGTLVTVSSGGGGSGGGGSGGGGSGGAIQLTQSPSSLSASVGDRVTITCRASQGISSALAWYQQKPGKAPKLLIYDASSLESGVPSRFSGSGSGTDFTLTISSLQPEDFATYYCQQFNSYPLTFGGGTKVEIK

SEQ ID NO: 21559 - protein, 246 aa, Artificial Sequence
  MSLN scFv domain
QVQLVESGGGLVKPGGSLRLSCAASGFTFSDYYMSWIRQAPGKGLEWVSYISSSGSTIYYADSVKGRFTISRDNAKNSLYLQMNSLRAEDTAVYYCARDGYRKYGYVFFDIWGQGTMVTVSSGGGGSGGGGSGGGGSGGAIQLTQSPSSLSASVGDRVTITCRASQGISSALAWYQQKPGKAPKLLIYDASSLESGVPSRFSGSGSGTDFTLTISSLQPEDFATYYCQQFNSYPLTFGGGTKVEIK

SEQ ID NO: 21560 - protein, 246 aa, Artificial Sequence
  MSLN scFv domain
QVQLVESGGGLVKPGGSLRLSCAASGFTFSDYYMSWIRQAPGKGLEWVSYISSSGSTIYYADSVKGRFTISRDNAKNSLYLQMNSLRAEDTAVYYCARDGRYRRFWHAFDIWGQGTMVTVSSGGGGSGGGGSGGGGSGGAIQLTQSPSSLSASVGDRVTITCRASQGISSALAWYQQKPGKAPKLLIYDASSLESGVPSRFSGSGSGTDFTLTISSLQPEDFATYYCQQFNSYPLTFGGGTKVEIK

SEQ ID NO: 21561 - protein, 242 aa, Artificial Sequence
  MSLN scFv domain
QVQLVESGGGLVKPGGSLRLSCAASGFTFSDYYMSWIRQAPGKGLEWVSYISSSGSTIYYADSVKGRFTISRDNAKNSLYLQMNSLRAEDTAVYYCARAHIRGYFDLWGRGTLVTVSSGGGGSGGGGSGGGGSGGAIQLTQSPSSLSASVGDRVTITCRASQGISSALAWYQQKPGKAPKLLIYDASSLESGVPSRFSGSGSGTDFTLTISSLQPEDFATYYCQQFNSYPLTFGGGTKVEIK

SEQ ID NO: 21562 - protein, 245 aa, Artificial Sequence
  MSLN scFv domain
EVQLLESGGGLVQPGGSLRLSCAASGFTFSSYAMSWVRQAPGKGLEWVSAISGSGGSTYYADSVKGRFTISRDNSKNTLYLQMNSLRAEDTAVYYCATWMGGGGRWYFDLWGRGTLVTVSSGGGGSGGGGSGGGGSGGAIQLTQSPSSLSASVGDRVTITCRASQGISSALAWYQQKPGKAPKLLIYDASSLESGVPSRFSGSGSGTDFTLTISSLQPEDFATYYCQQFNNYPLTFGGGTKVEIK

SEQ ID NO: 21563 - protein, 243 aa, Artificial Sequence
  MSLN scFv domain
EVQLLESGGGLVQPGGSLRLSCAASGFTFSSYAMSWVRQAPGKGLEWVSAISGSGGSTYYADSVKGRFTISRDNSKNTLYLQMNSLRAEDTAVYYCARTSRTTWYFDLWGRGTLVTVSSGGGGSGGGGSGGGGSGGAIQLTQSPSSLSASVGDRVTITCRASQGISSALAWYQQKPGKAPKLLIYDASSLESGVPSRFSGSGSGTDFTLTISSLQPEDFATYYCQQFNNYPLTFGGGTKVEIK

SEQ ID NO: 21564 - protein, 245 aa, Artificial Sequence
  MSLN scFv domain
EVQLLESGGGLVQPGGSLRLSCAASGFTFSSYAMSWVRQAPGKGLEWVSAISGSGGSTYYADSVKGRFTISRDNSKNTLYLQMNSLRAEDTAVYYCAKWMGGGGRLYFDLWGRGTLVTVSSGGGGSGGGGSGGGGSGGAIQLTQSPSSLSASVGDRVTITCRASQGISSALAWYQQKPGKAPKLLIYDASSLESGVPSRFSGSGSGTDFTLTISSLQPEDFATYYCQQFNNYPLTFGGGTKVEIK

SEQ ID NO: 21565 - protein, 244 aa, Artificial Sequence
  MSLN scFv domain
EVQLLESGGGLVQPGGSLRLSCAASGFTFSSYAMSWVRQAPGKGLEWVSAISGSGGSTYYADSVKGRFTISRDNSKNTLYLQMNSLRAEDTAVYYCAKWGGRLYWYFDLWGRGTLVTVSSGGGGSGGGGSGGGGSGGAIQLTQSPSSLSASVGDRVTITCRASQGISSALAWYQQKPGKAPKLLIYDASSLESGVPSRFSGSGSGTDFTLTISSLQPEDFATYYCQQFNNYPLTFGGGTKVEIK

SEQ ID NO: 21566 - protein, 243 aa, Artificial Sequence
  MSLN scFv domain
EVQLLESGGGLVQPGGSLRLSCAASGFTFSSYAMSWVRQAPGKGLEWVSAISGSGGSTYYADSVKGRFTISRDNSKNTLYLQMNSLRAEDTAVYYCAKVIRQLWYFDLWGRGTLVTVSSGGGGSGGGGSGGGGSGGAIQLTQSPSSLSASVGDRVTITCRASQGISSALAWYQQKPGKAPKLLIYDASSLESGVPSRFSGSGSGTDFTLTISSLQPEDFATYYCQQFNNYPLTFGGGTKVEIK

SEQ ID NO: 21567 - protein, 243 aa, Artificial Sequence
  MSLN scFv domain
EVQLLESGGGLVQPGGSLRLSCAASGFTFSSYAMSWVRQAPGKGLEWVSAISGSGGSTYYADSVKGRFTISRDNSKNTLYLQMNSLRAEDTAVYYCAKVFANSWYFDLWGRGTLVTVSSGGGGSGGGGSGGGGSGGAIQLTQSPSSLSASVGDRVTITCRASQGISSALAWYQQKPGKAPKLLIYDASSLESGVPSRFSGSGSGTDFTLTISSLQPEDFATYYCQQFNNYPLTFGGGTKVEIK

SEQ ID NO: 21568 - protein, 243 aa, Artificial Sequence
  MSLN scFv domain
EVQLLESGGGLVQPGGSLRLSCAASGFTFSSYAMSWVRQAPGKGLEWVSAISGSGGSTYYADSVKGRFTISRDNSKNTLYLQMNSLRAEDTAVYYCAKVDRTTWYFDLWGRGTLVTVSSGGGGSGGGGSGGGGSGGAIQLTQSPSSLSASVGDRVTITCRASQGISSALAWYQQKPGKAPKLLIYDASSLESGVPSRFSGSGSGTDFTLTISSLQPEDFATYYCQQFNNYPLTFGGGTKVEIK

SEQ ID NO: 21569 - protein, 246 aa, Artificial Sequence
  MSLN scFv domain
EVQLLESGGGLVQPGGSLRLSCAASGFTFSSYAMSWVRQAPGKGLEWVSAISGSGGSTYYADSVKGRFTISRDNSKNTLYLQMNSLRAEDTAVYYCAKRWGKDGPYWYFDLWGRGTLVTVSSGGGGSGGGGSGGGGSGGAIQLTQSPSSLSASVGDRVTITCRASQGISSALAWYQQKPGKAPKLLIYDASSLESGVPSRFSGSGSGTDFTLTISSLQPEDFATYYCQQFNNYPLTFGGGTKVEIK

SEQ ID NO: 21570 - protein, 246 aa, Artificial Sequence
  MSLN scFv domain
EVQLLESGGGLVQPGGSLRLSCAASGFTFSSYAMSWVRQAPGKGLEWVSAISGSGGSTYYADSVKGRFTISRDNSKNTLYLQMNSLRAEDTAVYYCAKRRDSYGPYWYFDLWGRGTLVTVSSGGGGSGGGGSGGGGSGGAIQLTQSPSSLSASVGDRVTITCRASQGISSALAWYQQKPGKAPKLLIYDASSLESGVPSRFSGSGSGTDFTLTISSLQPEDFATYYCQQFNNYPLTFGGGTKVEIK

SEQ ID NO: 21571 - protein, 245 aa, Artificial Sequence
  MSLN scFv domain
EVQLLESGGGLVQPGGSLRLSCAASGFTFSSYAMSWVRQAPGKGLEWVSAISGSGGSTYYADSVKGRFTISRDNSKNTLYLQMNSLRAEDTAVYYCAKNRPPPGYWYFDLWGRGTLVTVSSGGGGSGGGGSGGGGSGGAIQLTQSPSSLSASVGDRVTITCRASQGISSALAWYQQKPGKAPKLLIYDASSLESGVPSRFSGSGSGTDFTLTISSLQPEDFATYYCQQFNNYPLTFGGGTKVEIK

SEQ ID NO: 21572 - protein, 243 aa, Artificial Sequence
  MSLN scFv domain
EVQLLESGGGLVQPGGSLRLSCAASGFTFSSYAMSWVRQAPGKGLEWVSAISGSGGSTYYADSVKGRFTISRDNSKNTLYLQMNSLRAEDTAVYYCAKGRRFSWYFDLWGRGTLVTVSSGGGGSGGGGSGGGGSGGAIQLTQSPSSLSASVGDRVTITCRASQGISSALAWYQQKPGKAPKLLIYDASSLESGVPSRFSGSGSGTDFTLTISSLQPEDFATYYCQQFNNYPLTFGGGTKVEIK

SEQ ID NO: 21573 - protein, 5 aa, Artificial Sequence
  MSLN scFv domain HC CDR1
NAWMS

SEQ ID NO: 21574 - protein, 5 aa, Artificial Sequence
  MSLN scFv domain HC CDR1
SYAMH

SEQ ID NO: 21575 - protein, 7 aa, Artificial Sequence
  MSLN scFv domain HC CDR1
SGGYSWS

SEQ ID NO: 21576 - protein, 7 aa, Artificial Sequence
  MSLN scFv domain HC CDR1
SGGYYWS

SEQ ID NO: 21577 - protein, 7 aa, Artificial Sequence
  MSLN scFv domain HC CDR1
SSSYYWG

SEQ ID NO: 21578 - protein, 5 aa, Artificial Sequence
  MSLN scFv domain HC CDR1
SYSMN

SEQ ID NO: 21579 - protein, 5 aa, Artificial Sequence
  MSLN scFv domain HC CDR1
SYYWS

SEQ ID NO: 21580 - protein, 5 aa, Artificial Sequence
  MSLN scFv domain HC CDR1
DYGMS

SEQ ID NO: 21581 - protein, 5 aa, Artificial Sequence
  MSLN scFv domain HC CDR1
SYDIN

SEQ ID NO: 21582 - protein, 7 aa, Artificial Sequence
  MSLN scFv domain HC CDR1
SGDYYWS

SEQ ID NO: 21583 - protein, 5 aa, Artificial Sequence
  MSLN scFv domain HC CDR1
DYYMS

SEQ ID NO: 21584 - protein, 6 aa, Artificial Sequence
  MSLN scFv domain HC CDR1
SSNWWS

SEQ ID NO: 21585 - protein, 5 aa, Artificial Sequence
  MSLN scFv domain HC CDR1
SYGIS

SEQ ID NO: 21586 - protein, 5 aa, Artificial Sequence
  MSLN scFv domain HC CDR1
SNYMS

SEQ ID NO: 21587 - protein, 5 aa, Artificial Sequence
  MSLN scFv domain HC CDR1
SYGMH

SEQ ID NO: 21588 - protein, 5 aa, Artificial Sequence
  MSLN scFv domain HC CDR1
DYTMH

SEQ ID NO: 21589 - protein, 5 aa, Artificial Sequence
  MSLN scFv domain HC CDR1
SYAMN

SEQ ID NO: 21590 - protein, 7 aa, Artificial Sequence
  MSLN scFv domain HC CDR1
SGSYYWS

SEQ ID NO: 21591 - protein, 5 aa, Artificial Sequence
  MSLN scFv domain HC CDR1
SYAMS

SEQ ID NO: 21592 - protein, 5 aa, Artificial Sequence
  MSLN scFv domain HC CDR1
GYTMN

SEQ ID NO: 21593 - protein, 5 aa, Artificial Sequence
  MSLN scFv domain HC CDR1
SYWMH

SEQ ID NO: 21594 - protein, 19 aa, Artificial Sequence
  MSLN scFv domain HC CDR2
RIKSKTDGGTTDYAAPVKG

SEQ ID NO: 21595 - protein, 17 aa, Artificial Sequence
  MSLN scFv domain HC CDR2
AISSNGGSTYYANSVKG

SEQ ID NO: 21596 - protein, 16 aa, Artificial Sequence
  MSLN scFv domain HC CDR2
YIYHSGSTYYNPSLKS

SEQ ID NO: 21597 - protein, 17 aa, Artificial Sequence
  MSLN scFv domain HC CDR2
RINSDGSSTSYADSVKG

SEQ ID NO: 21598 - protein, 16 aa, Artificial Sequence
  MSLN scFv domain HC CDR2
YIYYSGSTYYNPSLKS

SEQ ID NO: 21599 - protein, 16 aa, Artificial Sequence
  MSLN scFv domain HC CDR2
SIYYSGSTYYNPSLKS

SEQ ID NO: 21600 - protein, 17 aa, Artificial Sequence
  MSLN scFv domain HC CDR2
YISSSSSTIYYADSVKG

SEQ ID NO: 21601 - protein, 17 aa, Artificial Sequence
  MSLN scFv domain HC CDR2
SISSSSSYIYYADSVKG

SEQ ID NO: 21602 - protein, 17 aa, Artificial Sequence
  MSLN scFv domain HC CDR2
WINAGNGNTKYSQKFQG

SEQ ID NO: 21603 - protein, 16 aa, Artificial Sequence
  MSLN scFv domain HC CDR2
YIYYSGSTNYNPSLKS

SEQ ID NO: 21604 - protein, 17 aa, Artificial Sequence
  MSLN scFv domain HC CDR2
GINWNGGSTGYADSVKG

SEQ ID NO: 21605 - protein, 17 aa, Artificial Sequence
  MSLN scFv domain HC CDR2
WMNPNSGNTGYAQKFQG

SEQ ID NO: 21606 - protein, 17 aa, Artificial Sequence
  MSLN scFv domain HC CDR2
YISSSGSTIYYADSVKG

SEQ ID NO: 21607 - protein, 16 aa, Artificial Sequence
  MSLN scFv domain HC CDR2
EIYHSGSTNYNPSLKS

SEQ ID NO: 21608 - protein, 17 aa, Artificial Sequence
  MSLN scFv domain HC CDR2
WISAYNGNTNYAQKLQG

SEQ ID NO: 21609 - protein, 16 aa, Artificial Sequence
  MSLN scFv domain HC CDR2
VIYSGGSTYYADSVKG

SEQ ID NO: 21610 - protein, 17 aa, Artificial Sequence
  MSLN scFv domain HC CDR2
VIWYDGSNKYYADSVKG

SEQ ID NO: 21611 - protein, 17 aa, Artificial Sequence
  MSLN scFv domain HC CDR2
LISWDGGSTYYADSVKG

SEQ ID NO: 21612 - protein, 17 aa, Artificial Sequence
  MSLN scFv domain HC CDR2
WINTNTGNPTYAQGFTG

SEQ ID NO: 21613 - protein, 17 aa, Artificial Sequence
  MSLN scFv domain HC CDR2
AISGSGGSTYYADSVKG

SEQ ID NO: 21614 - protein, 17 aa, Artificial Sequence
  MSLN scFv domain HC CDR2
LITPYNGASSYNQKFRG

SEQ ID NO: 21615 - protein, 10 aa, Artificial Sequence
  MSLN scFv domain HC CDR3
DLPKLRNFHI

SEQ ID NO: 21616 - protein, 15 aa, Artificial Sequence
  MSLN scFv domain HC CDR3
LEYHGFRQYGLRYWH

SEQ ID NO: 21617 - protein, 13 aa, Artificial Sequence
  MSLN scFv domain HC CDR3
IKFWFAGINYFFP

SEQ ID NO: 21618 - protein, 10 aa, Artificial Sequence
  MSLN scFv domain HC CDR3
GFLGMGSNFI

SEQ ID NO: 21619 - protein, 9 aa, Artificial Sequence
  MSLN scFv domain HC CDR3
GDRARYFDL

SEQ ID NO: 21620 - protein, 14 aa, Artificial Sequence
  MSLN scFv domain HC CDR3
YPRGYHQMVDAFDI

SEQ ID NO: 21621 - protein, 16 aa, Artificial Sequence
  MSLN scFv domain HC CDR3
VRFLAARTTIPEANFL

SEQ ID NO: 21622 - protein, 9 aa, Artificial Sequence
  MSLN scFv domain HC CDR3
VLSRARFDY

SEQ ID NO: 21623 - protein, 8 aa, Artificial Sequence
  MSLN scFv domain HC CDR3
LRGRVFDP

SEQ ID NO: 21624 - protein, 13 aa, Artificial Sequence
  MSLN scFv domain HC CDR3
IKFTSFLYVHGFL

SEQ ID NO: 21625 - protein, 13 aa, Artificial Sequence
  MSLN scFv domain HC CDR3
GQRWLYLGGIRRH

SEQ ID NO: 21626 - protein, 12 aa, Artificial Sequence
  MSLN scFv domain HC CDR3
EWIPSRPYYFDY

SEQ ID NO: 21627 - protein, 10 aa, Artificial Sequence
  MSLN scFv domain HC CDR3
ESTGTGAFDI

SEQ ID NO: 21628 - protein, 13 aa, Artificial Sequence
  MSLN scFv domain HC CDR3
ERYRRVLHWYFDL

SEQ ID NO: 21629 - protein, 7 aa, Artificial Sequence
  MSLN scFv domain HC CDR3
EPDAFDI

SEQ ID NO: 21630 - protein, 12 aa, Artificial Sequence
  MSLN scFv domain HC CDR3
EHMGTIPYYFDY

SEQ ID NO: 21631 - protein, 10 aa, Artificial Sequence
  MSLN scFv domain HC CDR3
EEFGYGDVLY

SEQ ID NO: 21632 - protein, 10 aa, Artificial Sequence
  MSLN scFv domain HC CDR3
EDVVKGAFDI

SEQ ID NO: 21633 - protein, 12 aa, Artificial Sequence
  MSLN scFv domain HC CDR3
EDFSHKLGYFQH

SEQ ID NO: 21634 - protein, 5 aa, Artificial Sequence
  MSLN scFv domain HC CDR3
DYDYV

SEQ ID NO: 21635 - protein, 10 aa, Artificial Sequence
  MSLN scFv domain HC CDR3
DRRDWDWFDP

SEQ ID NO: 21636 - protein, 10 aa, Artificial Sequence
  MSLN scFv domain HC CDR3
DQQALKYRVD

SEQ ID NO: 21637 - protein, 9 aa, Artificial Sequence
  MSLN scFv domain HC CDR3
DLTLGCFDY

SEQ ID NO: 21638 - protein, 10 aa, Artificial Sequence
  MSLN scFv domain HC CDR3
DGSNSWYFDL

SEQ ID NO: 21639 - protein, 9 aa, Artificial Sequence
  MSLN scFv domain HC CDR3
AFLFLSFSV

SEQ ID NO: 21640 - protein, 12 aa, Artificial Sequence
  MSLN scFv domain HC CDR3
GIFYSSKEDFDY

SEQ ID NO: 21641 - protein, 15 aa, Artificial Sequence
  MSLN scFv domain HC CDR3
DIWIFYSSNPKPTVY

SEQ ID NO: 21642 - protein, 13 aa, Artificial Sequence
  MSLN scFv domain HC CDR3
KDQTLTYGNWFDP

SEQ ID NO: 21643 - protein, 8 aa, Artificial Sequence
  MSLN scFv domain HC CDR3
DHYERGLY

SEQ ID NO: 21644 - protein, 9 aa, Artificial Sequence
  MSLN scFv domain HC CDR3
YMYNWYFDL

SEQ ID NO: 21645 - protein, 8 aa, Artificial Sequence
  MSLN scFv domain HC CDR3
DRRPAFDI

SEQ ID NO: 21646 - protein, 10 aa, Artificial Sequence
  MSLN scFv domain HC CDR3
HLKRRPYFDY

SEQ ID NO: 21647 - protein, 9 aa, Artificial Sequence
  MSLN scFv domain HC CDR3
VHKKPIFDY

SEQ ID NO: 21648 - protein, 9 aa, Artificial Sequence
  MSLN scFv domain HC CDR3
TSRRCTFQH

SEQ ID NO: 21649 - protein, 9 aa, Artificial Sequence
  MSLN scFv domain HC CDR3
TSPRPLFQH

SEQ ID NO: 21650 - protein, 11 aa, Artificial Sequence
  MSLN scFv domain HC CDR3
PYQVRGVYFDY

SEQ ID NO: 21651 - protein, 11 aa, Artificial Sequence
  MSLN scFv domain HC CDR3
PYKKRRTVFDY

SEQ ID NO: 21652 - protein, 10 aa, Artificial Sequence
  MSLN scFv domain HC CDR3
LQRGLALFQH

SEQ ID NO: 21653 - protein, 9 aa, Artificial Sequence
  MSLN scFv domain HC CDR3
ILSVPYFDL

SEQ ID NO: 21654 - protein, 14 aa, Artificial Sequence
  MSLN scFv domain HC CDR3
GWIRVPLRLPLFQH

SEQ ID NO: 21655 - protein, 9 aa, Artificial Sequence
  MSLN scFv domain HC CDR3
VTIFAIFDI

SEQ ID NO: 21656 - protein, 10 aa, Artificial Sequence
  MSLN scFv domain HC CDR3
VGRGFVHFDL

SEQ ID NO: 21657 - protein, 11 aa, Artificial Sequence
  MSLN scFv domain HC CDR3
TSRGLCVLFDY

SEQ ID NO: 21658 - protein, 11 aa, Artificial Sequence
  MSLN scFv domain HC CDR3
SGPSSYWYFDL

SEQ ID NO: 21659 - protein, 11 aa, Artificial Sequence
  MSLN scFv domain HC CDR3
NIYMGGIWFDP

SEQ ID NO: 21660 - protein, 10 aa, Artificial Sequence
  MSLN scFv domain HC CDR3
LTVRTGAFDI

SEQ ID NO: 21661 - protein, 10 aa, Artificial Sequence
  MSLN scFv domain HC CDR3
LRTAHLDFDL

SEQ ID NO: 21662 - protein, 10 aa, Artificial Sequence
  MSLN scFv domain HC CDR3
DLIFPVVFDY

SEQ ID NO: 21663 - protein, 13 aa, Artificial Sequence
  MSLN scFv domain HC CDR3
DGYRKYGYVFFDI

SEQ ID NO: 21664 - protein, 13 aa, Artificial Sequence
  MSLN scFv domain HC CDR3
DGRYRRFWHAFDI

SEQ ID NO: 21665 - protein, 9 aa, Artificial Sequence
  MSLN scFv domain HC CDR3
AHIRGYFDL

SEQ ID NO: 21666 - protein, 12 aa, Artificial Sequence
  MSLN scFv domain HC CDR3
WMGGGGRWYFDL

SEQ ID NO: 21667 - protein, 10 aa, Artificial Sequence
  MSLN scFv domain HC CDR3
TSRTTWYFDL

SEQ ID NO: 21668 - protein, 12 aa, Artificial Sequence
  MSLN scFv domain HC CDR3
WMGGGGRLYFDL

SEQ ID NO: 21669 - protein, 11 aa, Artificial Sequence
  MSLN scFv domain HC CDR3
WGGRLYWYFDL

SEQ ID NO: 21670 - protein, 10 aa, Artificial Sequence
  MSLN scFv domain HC CDR3
VIRQLWYFDL

SEQ ID NO: 21671 - protein, 10 aa, Artificial Sequence
  MSLN scFv domain HC CDR3
VFANSWYFDL

SEQ ID NO: 21672 - protein, 10 aa, Artificial Sequence
  MSLN scFv domain HC CDR3
VDRTTWYFDL

SEQ ID NO: 21673 - protein, 13 aa, Artificial Sequence
  MSLN scFv domain HC CDR3
RWGKDGPYWYFDL

SEQ ID NO: 21674 - protein, 13 aa, Artificial Sequence
  MSLN scFv domain HC CDR3
RRDSYGPYWYFDL

SEQ ID NO: 21675 - protein, 12 aa, Artificial Sequence
  MSLN scFv domain HC CDR3
NRPPPGYWYFDL

SEQ ID NO: 21676 - protein, 10 aa, Artificial Sequence
  MSLN scFv domain HC CDR3
GRRFSWYFDL

SEQ ID NO: 21677 - protein, 14 aa, Artificial Sequence
  MSLN scFv domain HC CDR3
CAREDVVKGAFDIW

SEQ ID NO: 21678 - protein, 10 aa, Artificial Sequence
  MSLN scFv domain HC CDR3
GGYDGRGFDY

SEQ ID NO: 21679 - protein, 11 aa, Artificial Sequence
  MSLN scFv domain LC CDR1
RASQSISSYLN

SEQ ID NO: 21680 - protein, 14 aa, Artificial Sequence
  CDR-L1
TGTSSDVGGYNYVS

SEQ ID NO: 21681 - protein, 11 aa, Artificial Sequence
  MSLN scFv domain LC CDR1
RASQGISSWLA

SEQ ID NO: 21682 - protein, 11 aa, Artificial Sequence
  MSLN scFv domain LC CDR1
RASQGISSALA

SEQ ID NO: 21683 - protein, 10 aa, Artificial Sequence
  MSLN scFv domain LC CDR1
SASSSVSYMH

SEQ ID NO: 21684 - protein, 7 aa, Artificial Sequence
  MSLN scFv domain LC CDR2
AASSLQS

SEQ ID NO: 21685 - protein, 7 aa, Artificial Sequence
  MSLN scFv domain LC CDR2
DTSKLAS

SEQ ID NO: 21686 - protein, 9 aa, Artificial Sequence
  MSLN scFv domain LC CDR3
QQSYSTPLT

SEQ ID NO: 21687 - protein, 9 aa, Artificial Sequence
  MSLN scFv domain LC CDR3
QQANSFPLT

SEQ ID NO: 21688 - protein, 9 aa, Artificial Sequence
  MSLN scFv domain LC CDR3
QQWSGYPLT

SEQ ID NO: 21689 - protein, 244 aa, Artificial Sequence
  HLA-B*07 antigen binding domain BB7.1.10_scFv
QVQLQESGPGLVKPSQTLSLTCTVSGYSITSGYSWHWIRQPPGKGLEWIGYIHFSGSTHYHPSLKSRVTISVDTSKNQFSLKLSSVTAADTAVYYCARGGVVSHYAMDCWGQGTTVTVSSGGGGSGGGGSGGGGSGGDIQMTQSPSSLSASVGDRVTITCRASENIYSNLAWYQQKPGKAPKLLIYAATYLPDGVPSRFSGSGSGTDFTLTISSLQPEDFATYYCQHFWVTPYTFGGGTKVEIK

SEQ ID NO: 21690 - protein, 244 aa, Artificial Sequence
  HLA-B*07 antigen binding domain BB7.1.9_scFv
EVQLVESGGGLVKPGGSLRLSCAASGYSITSGYSWHWVRQAPGKGLEWVSYIHFSGSTHYHPSLKSRFTISRDNAKNSLYLQMNSLRAEDTAVYYCARGGVVSHYAMDCWGQGTTVTVSSGGGGSGGGGSGGGGSGGDIQMTQSPSSVSASVGDRVTITCRASENIYSNLAWYQQKPGKAPKLLIYAATYLPDGVPSRFSGSGSGTDFTLTISSLQPEDFATYYCQHFWVTPYTFGGGTKVEIK

SEQ ID NO: 21691 - protein, 244 aa, Artificial Sequence
  HLA-B*07 antigen binding domain BB7.1.8_scFv
EVQLVESGGGLVKPGGSLRLSCAASGYSITSGYSWHWVRQAPGKGLEWVGYIHFSGSTHYHPSLKSRFTISRDDSKNTLYLQMNSLKTEDTAVYYCARGGVVSHYAMDCWGQGTTVTVSSGGGGSGGGGSGGGGSGGEIVLTQSPATLSLSPGERATLSCRASENIYSNLAWYQQKPGQAPRLLIYAATYLPDGIPARFSGSGSGTDFTLTISSLEPEDFAVYYCQHFWVTPYTFGGGTKVEIK

SEQ ID NO: 21692 - protein, 244 aa, Artificial Sequence
  HLA-B*07 antigen binding domain BB7.1.7_scFv
QVQLQQSGPGLVKPSQTLSLTCAISGYSITSGYSWHWIRQSPSRGLEWLGYIHFSGSTHYHPSLKSRITINPDTSKNQFSLQLNSVTPEDTAVYYCARGGVVSHYAMDCWGQGTTVTVSSGGGGSGGGGSGGGGSGGEIVLTQSPATLSLSPGERATLSCRASENIYSNLAWYQQKPGQAPRLLIYAATYLPDGIPARFSGSGSGTDFTLTISRLEPEDFAVYYCQHFWVTPYTFGGGTKVEIK

SEQ ID NO: 21693 - protein, 244 aa, Artificial Sequence
  HLA-B*07 antigen binding domain BB7.1.6_scFv
EVQLVESGGGLVKPGGSLRLSCAASGYSITSGYSWHWVRQAPGKGLEWVGYIHFSGSTHYHPSLKSRFTISRDDSKNTLYLQMNSLKTEDTAVYYCARGGVVSHYAMDCWGQGTTVTVSSGGGGSGGGGSGGGGSGGDIQMTQSPSSVSASVGDRVTITCRASENIYSNLAWYQQKPGKAPKLLIYAATYLPDGVPSRFSGSGSGTDFTLTISSLQPEDFATYYCQHFWVTPYTFGGGTKVEIK

SEQ ID NO: 21694 - protein, 244 aa, Artificial Sequence
  HLA-B*07 antigen binding domain BB7.1.5_scFv
EVQLVESGGGLVQPGGSLRLSCAASGYSITSGYSWHWVRQAPGKGLEWVSYIHFSGSTHYHPSLKSRFTISRDNSKNTLYLQMNSLRAEDTAVYYCARGGVVSHYAMDCWGQGTTVTVSSGGGGSGGGGSGGGGSGGDIQMTQSPSSLSASVGDRVTITCRASENIYSNLAWYQQKPGKAPKLLIYAATYLPDGVPSRFSGSGSGTDFTLTISSLQPEDFATYYCQHFWVTPYTFGGGTKVEIK

SEQ ID NO: 21695 - protein, 244 aa, Artificial Sequence
  HLA-B*07 antigen binding domain BB7.1.4_scFv
EVQLVESGGGLVKPGGSLRLSCAASGYSITSGYSWHWVRQAPGKGLEWVGYIHFSGSTHYHPSLKSRFTISRDDSKNTLYLQMNSLKTEDTAVYYCARGGVVSHYAMDCWGQGTTVTVSSGGGGSGGGGSGGGGSGGDIQMTQSPSSLSASVGDRVTITCRASENIYSNLAWYQQKPGKAPKLLIYAATYLPDGVPSRFSGSGSGTDFTLTISSLQPEDFATYYCQHFWVTPYTFGGGTKVEIK

SEQ ID NO: 21696 - protein, 244 aa, Artificial Sequence
  HLA-B*07 antigen binding domain BB7.1.3_scFv
QVQLQQWGAGLLKPSETLSLTCAVYGYSITSGYSWHWIRQPPGKGLEWIGYIHFSGSTHYHPSLKSRVTISVDTSKNQFSLKLSSVTAADTAVYYCARGGVVSHYAMDCWGQGTTVTVSSGGGGSGGGGSGGGGSGGDIQMTQSPSSLSASVGDRVTITCRASENIYSNLAWYQQKPGKAPKLLIYAATYLPDGVPSRFSGSGSGTDFTLTISSLQPEDFATYYCQHFWVTPYTFGGGTKVEIK

SEQ ID NO: 21697 - protein, 244 aa, Artificial Sequence
  HLA-B*07 antigen binding domain BB7.1.2_scFv
QVQLQESGPGLVKPSQTLSLTCTVSGYSITSGYSWHWIRQHPGKGLEWIGYIHFSGSTHYHPSLKSRVTISVDTSKNQFSLKLSSVTAADTAVYYCARGGVVSHYAMDCWGQGTTVTVSSGGGGSGGGGSGGGGSGGDIQMTQSPSSLSASVGDRVTITCRASENIYSNLAWYQQKPGKAPKLLIYAATYLPDGVPSRFSGSGSGTDFTLTISSLQPEDFATYYCQHFWVTPYTFGGGTKVEIK

SEQ ID NO: 21698 - protein, 244 aa, Artificial Sequence
  HLA-B*07 antigen binding domain BB7.1.1_scFv
QVQLQQSGPGLVKPSQTLSLTCAISGYSITSGYSWHWIRQSPSRGLEWLGYIHFSGSTHYHPSLKSRITINPDTSKNQFSLQLNSVTPEDTAVYYCARGGVVSHYAMDCWGQGTTVTVSSGGGGSGGGGSGGGGSGGDIQMTQSPSSLSASVGDRVTITCRASENIYSNLAWYQQKPGKAPKLLIYAATYLPDGVPSRFSGSGSGTDFTLTISSLQPEDFATYYCQHFWVTPYTFGGGTKVEIK

SEQ ID NO: 21699 - protein, 243 aa, Artificial Sequence
  HLA-A*11 antigen binding domain 9
QVQLQESGPGLVKPSQTLSLTCTVSGGSISSGGYYWSWIRQPPGKGLEWIGYIYYSGSTYYNPSLKSRVTISVDTSKNQFSLKLSSVTAADTAVYYCARHYYYYSMDVWGKGTTVTVSSGGGGSGGGGSGGGGSGGDIQMTQSPSSLSASVGDRVTITCRASQSISSYLNWYQQKPGKAPKLLIYAASSLQSGVPSRFSGSGSGTDFTLTISSLQPEDFATYYCQQSYSTPLTFGGGTKVEIK

SEQ ID NO: 21700 - protein, 244 aa, Artificial Sequence
  HLA-A*11 antigen binding domain 8
QITLKESGPTLVKPTQTLTLTCTFSGFSLSTSGVGVGWIRQPPGKALEWLALIYWNDDKRYSPSLKSRLTITKDTSKNQVVLTMTNMDPVDTATYYCAHRHMRLSCFDYWGQGTLVTVSSGGGGSGGGGSGGGGSGGDIQMTQSPSSLSASVGDRVTITCRASQSISSYLNWYQQKPGKAPKLLIYAASSLQSGVPSRFSGSGSGTDFTLTISSLQPEDFATYYCQQSYSTPLTFGGGTKVEIK

SEQ ID NO: 21701 - protein, 245 aa, Artificial Sequence
  HLA-A*11 antigen binding domain 7
QVQLVQSGAEVKKPGASVKVSCKASGYTFTSYAMHWVRQAPGQRLEWMGWINAGNGNTKYSQKFQGRVTITRDTSASTAYMELSSLRSEDTAVYYCAREGNGANPDAFDIWGQGTMVTVSSGGGGSGGGGSGGGGSGGDIQMTQSPSSLSASVGDRVTITCRASQSISSYLNWYQQKPGKAPKLLIYAASSLQSGVPSRFSGSGSGTDFTLTISSLQPEDFATYYCQQSYSTPLTFGGGTKVEIK

SEQ ID NO: 21702 - protein, 243 aa, Artificial Sequence
  HLA-A*11 antigen binding domain 6
EVQLVESGGGLVQPGGSLRLSCAASGFTFSSYDMHWVRQATGKGLEWVSAIGTAGDTYYPGSVKGRFTISRENAKNSLYLQMNSLRAGDTAVYYCARDLPGSYWYFDLWGRGTLVTVSSGGGGSGGGGSGGGGSGGDIQMTQSPSSLSASVGDRVTITCRASQSISSYLNWYQQKPGKAPKLLIYAASSLQSGVPSRFSGSGSGTDFTLTISSLQPEDFATYYCQQSYSTPLTFGGGTKVEIK

SEQ ID NO: 21703 - protein, 243 aa, Artificial Sequence
  HLA-A*11 antigen binding domain 5
QVQLQESGPGLVKPSQTLSLTCTVSGGSISSGGYYWSWIRQPPGKGLEWIGYIYYSGSTYYNPSLKSRVTISVDTSKNQFSLKLSSVTAADTAVYYCARHYYYYYLDVWGKGTTVTVSSGGGGSGGGGSGGGGSGGDIQMTQSPSSLSASVGDRVTITCRASQSISSYLNWYQQKPGKAPKLLIYAASSLQSGVPSRFSGSGSGTDFTLTISSLQPEDFATYYCQQSYSTPLTFGGGTKVEIK

SEQ ID NO: 21704 - protein, 243 aa, Artificial Sequence
  HLA-A*11 antigen binding domain 4
EVQLVESGGGLVQPGGSLRLSCAASGFTFSSYWMHWVRQAPGKGLVWVSRINSDGSSTSYADSVKGRFTISRDNAKNTLYLQMNSLRAEDTAVYYCCLGVLLYNWFDPWGQGTLVTVSSGGGGSGGGGSGGGGSGGDIQMTQSPSSLSASVGDRVTITCRASQSISSYLNWYQQKPGKAPKLLIYAASSLQSGVPSRFSGSGSGTDFTLTISSLQPEDFATYYCQQSYSTPLTFGGGTKVEIK

SEQ ID NO: 21705 - protein, 242 aa, Artificial Sequence
  HLA-A*11 antigen binding domain 3
QVQLQESGPGLVKPSQTLSLTCTVSGGSISSGGYYWSWIRQPPGKGLEWIGYIYYSGSTYYNPSLKSRVTISVDTSKNQFSLKLSSVTAADTAVYYCARHYYYYMDVWGKGTTVTVSSGGGGSGGGGSGGGGSGGDIQMTQSPSSLSASVGDRVTITCRASQSISSYLNWYQQKPGKAPKLLIYAASSLQSGVPSRFSGSGSGTDFTLTISSLQPEDFATYYCQQSYSTPLTFGGGTKVEIK

SEQ ID NO: 21706 - protein, 243 aa, Artificial Sequence
  HLA-A*11 antigen binding domain 2
QITLKESGPTLVKPTQTLTLTCTFSGFSLSTSGVGVGWIRQPPGKALEWLALIYWNDDKRYSPSLKSRLTITKDTSKNQVVLTMTNMDPVDTATYYCAHKTTSFYFDYWGQGTLVTVSSGGGGSGGGGSGGGGSGGDIQMTQSPSSLSASVGDRVTITCRASQSISSYLNWYQQKPGKAPKLLIYAASSLQSGVPSRFSGSGSGTDFTLTISSLQPEDFATYYCQQSYSTPLTFGGGTKVEIK

SEQ ID NO: 21707 - protein, 243 aa, Artificial Sequence
  HLA-A*11 antigen binding domain 1
QVQLQESGPGLVKPSQTLSLTCTVSGGSISSGGYYWSWIRQPPGKGLEWIGYIYYSGSTYYNPSLKSRVTISVDTSKNQFSLKLSSVTAADTAVYYCARHYYYYYMDVWGKGTTVTVSSGGGGSGGGGSGGGGSGGDIQMTQSPSSLSASVGDRVTITCRASQSISSYLNWYQQKPGKAPKLLIYAASSLQSGVPSRFSGSGSGTDFTLTISSLQPEDFATYYCQQSYSTPLTFGGGTKVEIK

SEQ ID NO: 21708 - protein, 240 aa, Artificial Sequence
  HLA-C*07 antigen binding domain C7-45
EVQLLESGGGLVQPGGSLRLSCAASGFTFSSYAMSWVRQAPGKGLEWVSAISGSGGSTYYADSVKGRFTISRDNSKNTLYLQMNSLRAEDTAVYYCAVSFDWFDPWGQGTLVTVSSGGGGSGGGGSGGGGSGGDIQMTQSPSSLSASVGDRVTITCRASQSISSYLNWYQQKPGKAPKLLIYAASSLQSGVPSRFSGSGSGTDFTLTISSLQPEDFATYYCQQSYSTPLTFGGGTKVEIK

SEQ ID NO: 21709 - protein, 248 aa, Artificial Sequence
  HLA-C*07 antigen binding domain C7-44
QVQLQESGPGLVKPSQTLSLTCTVSGGSISSGGYYWSWIRQPPGKGLEWIGYIYYSGSTYYNPSLKSRVTISVDTSKNQFSLKLSSVTAADTAVYYCARERSISPYYYYYMDVWGKGTTVTVSSGGGGSGGGGSGGGGSGGDIQMTQSPSSLSASVGDRVTITCRASQSISSYLNWYQQKPGKAPKLLIYAASSLQSGVPSRFSGSGSGTDFTLTISSLQPEDFATYYCQQSYSTPLTFGGGTKVEIK

SEQ ID NO: 21710 - protein, 247 aa, Artificial Sequence
  HLA-C*07 antigen binding domain C7-43
QLQLQESGPGLVKPSETLSLTCTVSGGSISSSSYYWGWIRQPPGKGLEWIGSIYYSGSTYYNPSLKSRVTISVDTSKNQFSLKLSSVTAADTAVYYCARDSVIWYWFDPWGQGTLVTVSSGGGGSGGGGSGGGGSGGQSVLTQPPSASGTPGQRVTISCSGSSSNIGSNTVNWYQQLPGTAPKLLIYSNNQRPSGVPDRFSGSKSGTSASLAISGLQSEDEADYYCAAWDDSLNGWVFGGGTKLTVL

SEQ ID NO: 21711 - protein, 249 aa, Artificial Sequence
  HLA-C*07 antigen binding domain C7-42
QVQLQESGPGLVKPSQTLSLTCTVSGGSISSGGYYWSWIRQPPGKGLEWIGYIYYSGSTYYNPSLKSRVTISVDTSKNQFSLKLSSVTAADTAVYYCAREEILPRLSYYYYMDVWGKGTTVTVSSGGGGSGGGGSGGGGSGGDIQMTQSPSSLSASVGDRVTITCRASQSISSYLNWYQQKPGKAPKLLIYAASSLQSGVPSRFSGSGSGTDFTLTISSLQPEDFATYYCQQSYSTPLTFGGGTKVEIK

SEQ ID NO: 21712 - protein, 245 aa, Artificial Sequence
  HLA-C*07 antigen binding domain C7-41
QVQLVQSGSELKKPGASVKVSCKASGYTFTSYAMNWVRQAPGQGLEWMGWINTNTGNPTYAQGFTGRFVFSFDTSVSTAYLQICSLKAEDTAVYYCARGGRAHSSWYFDLWGRGTLVTVSSGGGGSGGGGSGGGGSGGDIQMTQSPSSLSASVGDRVTITCRASQSISSYLNWYQQKPGKAPKLLIYAASSLQSGVPSRFSGSGSGTDFTLTISSLQPEDFATYYCQQSYSTPLTFGGGTKVEIK

SEQ ID NO: 21713 - protein, 251 aa, Artificial Sequence
  HLA-C*07 antigen binding domain C7-40
QVQLQESGPGLVKPSQTLSLTCTVSGGSISSGGYYWSWIRQPPGKGLEWIGYIYYSGSTYYNPSLKSRVTISVDTSKNQFSLKLSSVTAADTAVYYCARDRIKILPRLGYYYYMDVWGKGTTVTVSSGGGGSGGGGSGGGGSGGDIQMTQSPSSLSASVGDRVTITCRASQSISSYLNWYQQKPGKAPKLLIYAASSLQSGVPSRFSGSGSGTDFTLTISSLQPEDFATYYCQQSYSTPLTFGGGTKVEIK

SEQ ID NO: 21714 - protein, 246 aa, Artificial Sequence
  HLA-C*07 antigen binding domain C7-39
QVQLQESGPGLVKPSQTLSLTCTVSGGSISSGGYYWSWIRQPPGKGLEWIGYIYYSGSTYYNPSLKSRVTISVDTSKNQFSLKLSSVTAADTAVYYCARDTVIHYYYYMDVWGKGTTVTVSSGGGGSGGGGSGGGGSGGDIQMTQSPSSLSASVGDRVTITCRASQSISSYLNWYQQKPGKAPKLLIYAASSLQSGVPSRFSGSGSGTDFTLTISSLQPEDFATYYCQQSYSTPLTFGGGTKVEIK

SEQ ID NO: 21715 - protein, 250 aa, Artificial Sequence
  HLA-C*07 antigen binding domain C7-38
QVQLQESGPGLVKPSQTLSLTCTVSGGSISSGGYYWSWIRQPPGKGLEWIGYIYYSGSTYYNPSLKSRVTISVDTSKNQFSLKLSSVTAADTAVYYCARDVIVEVFLSYYYYMDVWGKGTTVTVSSGGGGSGGGGSGGGGSGGDIQMTQSPSSLSASVGDRVTITCRASQSISSYLNWYQQKPGKAPKLLIYAASSLQSGVPSRFSGSGSGTDFTLTISSLQPEDFATYYCQQSYSTPLTFGGGTKVEIK

SEQ ID NO: 21716 - protein, 246 aa, Artificial Sequence
  HLA-C*07 antigen binding domain C7-37
QVQLQESGPGLVKPSQTLSLTCTVSGGSISSGGYYWSWIRQPPGKGLEWIGYIYYSGSTYYNPSLKSRVTISVDTSKNQFSLKLSSVTAADTAVYYCARDIFIHYYYYMDVWGKGTTVTVSSGGGGSGGGGSGGGGSGGDIQMTQSPSSLSASVGDRVTITCRASQSISSYLNWYQQKPGKAPKLLIYAASSLQSGVPSRFSGSGSGTDFTLTISSLQPEDFATYYCQQSYSTPLTFGGGTKVEIK

SEQ ID NO: 21717 - protein, 247 aa, Artificial Sequence
  HLA-C*07 antigen binding domain C7-36
EVQLVESGGGLVQPGGSLRLSCAASGFTFSSYSMNWVRQAPGKGLEWVSYISSSSSTIYYADSVKGRFTISRDNAKNSLYLQMNSLRAEDTAVYYCARDGTFYSYSPYYFDYWGQGTLVTVSSGGGGSGGGGSGGGGSGGDIQMTQSPSSLSASVGDRVTITCRASQSISSYLNWYQQKPGKAPKLLIYAASSLQSGVPSRFSGSGSGTDFTLTISSLQPEDFATYYCQQSYSTPLTFGGGTKVEIK

SEQ ID NO: 21718 - protein, 251 aa, Artificial Sequence
  HLA-C*07 antigen binding domain C7-35
QVQLQESGPGLVKPSQTLSLTCTVSGGSISSGGYYWSWIRQPPGKGLEWIGYIYYSGSTYYNPSLKSRVTISVDTSKNQFSLKLSSVTAADTAVYYCAREWIKILPRLGYYYYMDVWGKGTTVTVSSGGGGSGGGGSGGGGSGGDIQMTQSPSSLSASVGDRVTITCRASQSISSYLNWYQQKPGKAPKLLIYAASSLQSGVPSRFSGSGSGTDFTLTISSLQPEDFATYYCQQSYSTPLTFGGGTKVEIK

SEQ ID NO: 21719 - protein, 246 aa, Artificial Sequence
  HLA-C*07 antigen binding domain C7-34
QVQLQESGPGLVKPSQTLSLTCTVSGGSISSGGYYWSWIRQPPGKGLEWIGYIYYSGSTYYNPSLKSRVTISVDTSKNQFSLKLSSVTAADTAVYYCARDRSLYYYYYMDVWGKGTTVTVSSGGGGSGGGGSGGGGSGGDIQMTQSPSSLSASVGDRVTITCRASQSISSYLNWYQQKPGKAPKLLIYAASSLQSGVPSRFSGSGSGTDFTLTISSLQPEDFATYYCQQSYSTPLTFGGGTKVEIK

SEQ ID NO: 21720 - protein, 248 aa, Artificial Sequence
  HLA-C*07 antigen binding domain C7-33
QVQLQESGPGLVKPSQTLSLTCTVSGGSISSGGYYWSWIRQPPGKGLEWIGYIYYSGSTYYNPSLKSRVTISVDTSKNQFSLKLSSVTAADTAVYYCARDKILAPNYYYYMDVWGKGTTVTVSSGGGGSGGGGSGGGGSGGDIQMTQSPSSLSASVGDRVTITCRASQSISSYLNWYQQKPGKAPKLLIYAASSLQSGVPSRFSGSGSGTDFTLTISSLQPEDFATYYCQQSYSTPLTFGGGTKVEIK

SEQ ID NO: 21721 - protein, 250 aa, Artificial Sequence
  HLA-C*07 antigen binding domain C7-32
QVQLQESGPGLVKPSQTLSLTCTVSGGSISSGGYYWSWIRQPPGKGLEWIGYIYYSGSTYYNPSLKSRVTISVDTSKNQFSLKLSSVTAADTAVYYCAREKSWKYFYYYYYYMDVWGKGTTVTVSSGGGGSGGGGSGGGGSGGDIQMTQSPSSLSASVGDRVTITCRASQSISSYLNWYQQKPGKAPKLLIYAASSLQSGVPSRFSGSGSGTDFTLTISSLQPEDFATYYCQQSYSTPLTFGGGTKVEIK

SEQ ID NO: 21722 - protein, 249 aa, Artificial Sequence
  HLA-C*07 antigen binding domain C7-31
QVQLQESGPGLVKPSQTLSLTCTVSGGSISSGGYYWSWIRQPPGKGLEWIGYIYYSGSTYYNPSLKSRVTISVDTSKNQFSLKLSSVTAADTAVYYCARENTSTIPYYYYYMDVWGKGTTVTVSSGGGGSGGGGSGGGGSGGDIQMTQSPSSLSASVGDRVTITCRASQSISSYLNWYQQKPGKAPKLLIYAASSLQSGVPSRFSGSGSGTDFTLTISSLQPEDFATYYCQQSYSTPLTFGGGTKVEIK

SEQ ID NO: 21723 - protein, 253 aa, Artificial Sequence
  HLA-C*07 antigen binding domain C7-30
QVQLQESGPGLVKPSQTLSLTCTVSGGSISSGGYYWSWIRQPPGKGLEWIGYIYYSGSTYYNPSLKSRVTISVDTSKNQFSLKLSSVTAADTAVYYCAREDVDKNTSTIYYYYYYMDVWGKGTTVTVSSGGGGSGGGGSGGGGSGGDIQMTQSPSSLSASVGDRVTITCRASQSISSYLNWYQQKPGKAPKLLIYAASSLQSGVPSRFSGSGSGTDFTLTISSLQPEDFATYYCQQSYSTPLTFGGGTKVEIK

SEQ ID NO: 21724 - protein, 250 aa, Artificial Sequence
  HLA-C*07 antigen binding domain C7-29
QVQLVESGGGLVKPGGSLRLSCAASGFTFSDYYMSWIRQAPGKGLEWVSYISSSGSTIYYADSVKGRFTISRDNAKNSLYLQMNSLRAEDTAVYYCARDGGDIVSSSAIYWYFDLWGRGTLVTVSSGGGGSGGGGSGGGGSGGAIQLTQSPSSLSASVGDRVTITCRASQGISSALAWYQQKPGKAPKLLIYDASSLESGVPSRFSGSGSGTDFTLTISSLQPEDFATYYCQQFNSYPLTFGGGTKVEIK

SEQ ID NO: 21725 - protein, 248 aa, Artificial Sequence
  HLA-C*07 antigen binding domain C7-28
QVQLQESGPGLVKPSQTLSLTCTVSGGSISSGGYYWSWIRQPPGKGLEWIGYIYYSGSTYYNPSLKSRVTISVDTSKNQFSLKLSSVTAADTAVYYCARDLILPPYYYYYMDVWGKGTTVTVSSGGGGSGGGGSGGGGSGGDIQMTQSPSSLSASVGDRVTITCRASQSISSYLNWYQQKPGKAPKLLIYAASSLQSGVPSRFSGSGSGTDFTLTISSLQPEDFATYYCQQSYSTPLTFGGGTKVEIK

SEQ ID NO: 21726 - protein, 253 aa, Artificial Sequence
  HLA-C*07 antigen binding domain C7-27
QVQLQESGPGLVKPSQTLSLTCTVSGGSISSGGYYWSWIRQPPGKGLEWIGYIYYSGSTYYNPSLKSRVTISVDTSKNQFSLKLSSVTAADTAVYYCARETWIKILPRYYYYYYYMDVWGKGTTVTVSSGGGGSGGGGSGGGGSGGDIQMTQSPSSLSASVGDRVTITCRASQSISSYLNWYQQKPGKAPKLLIYAASSLQSGVPSRFSGSGSGTDFTLTISSLQPEDFATYYCQQSYSTPLTFGGGTKVEIK

SEQ ID NO: 21727 - protein, 246 aa, Artificial Sequence
  HLA-C*07 antigen binding domain C7-26
QVQLQESGPGLVKPSQTLSLTCTVSGGSISSGGYYWSWIRQPPGKGLEWIGYIYYSGSTYYNPSLKSRVTISVDTSKNQFSLKLSSVTAADTAVYYCARDLSRYYYYYMDVWGKGTTVTVSSGGGGSGGGGSGGGGSGGDIQMTQSPSSLSASVGDRVTITCRASQSISSYLNWYQQKPGKAPKLLIYAASSLQSGVPSRFSGSGSGTDFTLTISSLQPEDFATYYCQQSYSTPLTFGGGTKVEIK

SEQ ID NO: 21728 - protein, 242 aa, Artificial Sequence
  HLA-C*07 antigen binding domain C7-25
EVQLVESGGGLVQPGGSLRLSCAASGFTFSSYSMNWVRQAPGKGLEWVSYISSSSSTIYYADSVKGRFTISRDNAKNSLYLQMNSLRAEDTAVYYCAREHIVLCFDYWGQGTLVTVSSGGGGSGGGGSGGGGSGGDIQMTQSPSSLSASVGDRVTITCRASQGISSWLAWYQQKPEKAPKSLIYAASSLQSGVPSRFSGSGSGTDFTLTISSLQPEDFATYYCQQYNSYPLTFGGGTKVEIK

SEQ ID NO: 21729 - protein, 249 aa, Artificial Sequence
  HLA-C*07 antigen binding domain C7-24
QVQLQESGPGLVKPSQTLSLTCTVSGGSISSGGYYWSWIRQPPGKGLEWIGYIYYSGSTYYNPSLKSRVTISVDTSKNQFSLKLSSVTAADTAVYYCARDKILPRPYYYYYMDVWGKGTTVTVSSGGGGSGGGGSGGGGSGGDIQMTQSPSSLSASVGDRVTITCRASQSISSYLNWYQQKPGKAPKLLIYAASSLQSGVPSRFSGSGSGTDFTLTISSLQPEDFATYYCQQSYSTPLTFGGGTKVEIK

SEQ ID NO: 21730 - protein, 244 aa, Artificial Sequence
  HLA-C*07 antigen binding domain C7-23
QVQLVQSGAEVKKPGASVKVSCKASGYTFTSYGISWVRQAPGQGLEWMGWISAYNGNTNYAQKLQGRVTMTTDTSTSTAYMELRSLRSDDTAVYYCARGSNEYFQHWGQGTLVTVSSGGGGSGGGGSGGGGSGGQSALTQPPSASGSPGQSVTISCTGTSSDVGGYNYVSWYQQHPGKAPKLMIYEVSKRPSGVPDRFSGSKSGNTASLTVSGLQAEDEADYYCSSYAGSNNWVFGGGTKLTVL

SEQ ID NO: 21731 - protein, 242 aa, Artificial Sequence
  HLA-C*07 antigen binding domain C7-22
QVQLVQSGSELKKPGASVKVSCKASGYTFTSYAMNWVRQAPGQGLEWMGWINTNTGNPTYAQGFTGRFVFSFDTSVSTAYLQICSLKAEDTAVYYCARGTSYWYFDLWGRGTLVTVSSGGGGSGGGGSGGGGSGGDIQMTQSPSSLSASVGDRVTITCRASQSISSYLNWYQQKPGKAPKLLIYAASSLQSGVPSRFSGSGSGTDFTLTISSLQPEDFATYYCQQSYSTPLTFGGGTKVEIK

SEQ ID NO: 21732 - protein, 248 aa, Artificial Sequence
  HLA-C*07 antigen binding domain C7-21
QVQLQESGPGLVKPSQTLSLTCTVSGGSISSGGYYWSWIRQPPGKGLEWIGYIYYSGSTYYNPSLKSRVTISVDTSKNQFSLKLSSVTAADTAVYYCAREEIVEVFYYYYMDVWGKGTTVTVSSGGGGSGGGGSGGGGSGGDIQMTQSPSSLSASVGDRVTITCRASQSISSYLNWYQQKPGKAPKLLIYAASSLQSGVPSRFSGSGSGTDFTLTISSLQPEDFATYYCQQSYSTPLTFGGGTKVEIK

SEQ ID NO: 21733 - protein, 241 aa, Artificial Sequence
  HLA-C*07 antigen binding domain C7-20
EVQLLESGGGLVQPGGSLRLSCAASGFTFSSYAMSWVRQAPGKGLEWVSAISGSGGSTYYADSVKGRFTISRDNSKNTLYLQMNSLRAEDTAVYYCAKVDDYYFDYWGQGTLVTVSSGGGGSGGGGSGGGGSGGDIQMTQSPSSLSASVGDRVTITCRASQSISSYLNWYQQKPGKAPKLLIYAASSLQSGVPSRFSGSGSGTDFTLTISSLQPEDFATYYCQQSYSTPLTFGGGTKVEIK

SEQ ID NO: 21734 - protein, 247 aa, Artificial Sequence
  HLA-C*07 antigen binding domain C7-19
EVQLVESGGGLVQPGGSLRLSCAASGFTFSSYWMHWVRQAPGKGLVWVSRINSDGSSTSYADSVKGRFTISRDNAKNTLYLQMNSLRAEDTAVYYCAWSTNILLSYTKAFDIWGQGTMVTVSSGGGGSGGGGSGGGGSGGDIQMTQSPSSLSASVGDRVTITCRASQSISSYLNWYQQKPGKAPKLLIYAASSLQSGVPSRFSGSGSGTDFTLTISSLQPEDFATYYCQQSYSTPLTFGGGTKVEIK

SEQ ID NO: 21735 - protein, 246 aa, Artificial Sequence
  HLA-C*07 antigen binding domain C7-18
QVQLQESGPGLVKPSQTLSLTCTVSGGSISSGGYYWSWIRQPPGKGLEWIGYIYYSGSTYYNPSLKSRVTISVDTSKNQFSLKLSSVTAADTAVYYCARDKTYYYYYYMDVWGKGTTVTVSSGGGGSGGGGSGGGGSGGDIQMTQSPSSLSASVGDRVTITCRASQSISSYLNWYQQKPGKAPKLLIYAASSLQSGVPSRFSGSGSGTDFTLTISSLQPEDFATYYCQQSYSTPLTFGGGTKVEIK

SEQ ID NO: 21736 - protein, 253 aa, Artificial Sequence
  HLA-C*07 antigen binding domain C7-17
QVQLQESGPGLVKPSQTLSLTCTVSGGSISSGGYYWSWIRQPPGKGLEWIGYIYYSGSTYYNPSLKSRVTISVDTSKNQFSLKLSSVTAADTAVYYCAREKYFHDKYFHDYYYYYMDVWGKGTTVTVSSGGGGSGGGGSGGGGSGGDIQMTQSPSSLSASVGDRVTITCRASQSISSYLNWYQQKPGKAPKLLIYAASSLQSGVPSRFSGSGSGTDFTLTISSLQPEDFATYYCQQSYSTPLTFGGGTKVEIK

SEQ ID NO: 21737 - protein, 246 aa, Artificial Sequence
  HLA-C*07 antigen binding domain C7-16
QVQLQESGPGLVKPSQTLSLTCTVSGGSISSGGYYWSWIRQPPGKGLEWIGYIYYSGSTYYNPSLKSRVTISVDTSKNQFSLKLSSVTAADTAVYYCARDTSVYYYYYMDVWGKGTTVTVSSGGGGSGGGGSGGGGSGGDIQMTQSPSSLSASVGDRVTITCRASQSISSYLNWYQQKPGKAPKLLIYAASSLQSGVPSRFSGSGSGTDFTLTISSLQPEDFATYYCQQSYSTPLTFGGGTKVEIK

SEQ ID NO: 21738 - protein, 248 aa, Artificial Sequence
  HLA-C*07 antigen binding domain C7-15
QVQLQESGPGLVKPSQTLSLTCTVSGGSISSGGYYWSWIRQPPGKGLEWIGYIYYSGSTYYNPSLKSRVTISVDTSKNQFSLKLSSVTAADTAVYYCAREKILPYYYYYYMDVWGKGTTVTVSSGGGGSGGGGSGGGGSGGDIQMTQSPSSLSASVGDRVTITCRASQSISSYLNWYQQKPGKAPKLLIYAASSLQSGVPSRFSGSGSGTDFTLTISSLQPEDFATYYCQQSYSTPLTFGGGTKVEIK

SEQ ID NO: 21739 - protein, 257 aa, Artificial Sequence
  HLA-C*07 antigen binding domain C7-14
EVQLVESGGGLVQPGGSLRLSCAASGFTFSSYSMNWVRQAPGKGLEWVSYISSSSSTIYYADSVKGRFTISRDNAKNSLYLQMNSLRAEDTAVYYCAIQWIYIYINPRGFIFLHDAFDIWGQGTMVTVSSGGGGSGGGGSGGGGSGGQSVLTQPPSASGTPGQRVTISCSGSSSNIGSNTVNWYQQLPGTAPKLLIYSNNQRPSGVPDRFSGSKSGTSASLAISGLQSEDEADYYCAAWDDSLNGWVFGGGTKLTVL

SEQ ID NO: 21740 - protein, 248 aa, Artificial Sequence
  HLA-C*07 antigen binding domain C7-13
QVQLQQSGPGLVKPSQTLSLTCAISGDSVSSNSAAWNWIRQSPSRGLEWLGRTYYRSKWYNDYAVSVKSRITINPDTSKNQFSLQLNSVTPEDTAVYYCAKEDVDFHHDAFDIWGQGTMVTVSSGGGGSGGGGSGGGGSGGDIQMTQSPSSLSASVGDRVTITCRASQSISSYLNWYQQKPGKAPKLLIYAASSLQSGVPSRFSGSGSGTDFTLTISSLQPEDFATYYCQQSYSTPLTFGGGTKVEIK

SEQ ID NO: 21741 - protein, 253 aa, Artificial Sequence
  HLA-C*07 antigen binding domain C7-12
QVQLQESGPGLVKPSQTLSLTCTVSGGSISSGGYYWSWIRQPPGKGLEWIGYIYYSGSTYYNPSLKSRVTISVDTSKNQFSLKLSSVTAADTAVYYCAREGVDKNTSTIYYYYYYMDVWGKGTTVTVSSGGGGSGGGGSGGGGSGGDIQMTQSPSSLSASVGDRVTITCRASQSISSYLNWYQQKPGKAPKLLIYAASSLQSGVPSRFSGSGSGTDFTLTISSLQPEDFATYYCQQSYSTPLTFGGGTKVEIK

SEQ ID NO: 21742 - protein, 241 aa, Artificial Sequence
  HLA-C*07 antigen binding domain C7-11
EVQLVESGGGLVQPGGSLRLSCAASGFTFSSYSMNWVRQAPGKGLEWVSYISSSSSTIYYADSVKGRFTISRDNAKNSLYLQMNSLRAEDTAVYYCARDRRGYFDLWGRGTLVTVSSGGGGSGGGGSGGGGSGGDIQMTQSPSSLSASVGDRVTITCRASQGISSWLAWYQQKPEKAPKSLIYAASSLQSGVPSRFSGSGSGTDFTLTISSLQPEDFATYYCQQYNSYPLTFGGGTKVEIK

SEQ ID NO: 21743 - protein, 248 aa, Artificial Sequence
  HLA-C*07 antigen binding domain C7-10
EVQLVQSGAEVKKPGATVKISCKVSGYTFTDYYMHWVQQAPGKGLEWMGLVDPEDGETIYAEKFQGRVTITADTSTDTAYMELSSLRSEDTAVYYCATGIHVDIRSMEDWFDPWGQGTLVTVSSGGGGSGGGGSGGGGSGGDIQMTQSPSSLSASVGDRVTITCRASQSISSYLNWYQQKPGKAPKLLIYAASSLQSGVPSRFSGSGSGTDFTLTISSLQPEDFATYYCQQSYSTPLTFGGGTKVEIK

SEQ ID NO: 21744 - protein, 246 aa, Artificial Sequence
  HLA-C*07 antigen binding domain C7-9
QVQLQESGPGLVKPSQTLSLTCTVSGGSISSGGYYWSWIRQPPGKGLEWIGYIYYSGSTYYNPSLKSRVTISVDTSKNQFSLKLSSVTAADTAVYYCARDIGTSYYYYMDVWGKGTTVTVSSGGGGSGGGGSGGGGSGGDIQMTQSPSSLSASVGDRVTITCRASQSISSYLNWYQQKPGKAPKLLIYAASSLQSGVPSRFSGSGSGTDFTLTISSLQPEDFATYYCQQSYSTPLTFGGGTKVEIK

SEQ ID NO: 21745 - protein, 249 aa, Artificial Sequence
  HLA-C*07 antigen binding domain C7-8
QVQLQESGPGLVKPSQTLSLTCTVSGGSISSGGYYWSWIRQPPGKGLEWIGYIYYSGSTYYNPSLKSRVTISVDTSKNQFSLKLSSVTAADTAVYYCAREVVEVFLYYYYYMDVWGKGTTVTVSSGGGGSGGGGSGGGGSGGDIQMTQSPSSLSASVGDRVTITCRASQSISSYLNWYQQKPGKAPKLLIYAASSLQSGVPSRFSGSGSGTDFTLTISSLQPEDFATYYCQQSYSTPLTFGGGTKVEIK

SEQ ID NO: 21746 - protein, 246 aa, Artificial Sequence
  HLA-C*07 antigen binding domain C7-7
QVQLQESGPGLVKPSQTLSLTCTVSGGSISSGGYYWSWIRQPPGKGLEWIGYIYYSGSTYYNPSLKSRVTISVDTSKNQFSLKLSSVTAADTAVYYCARDLYYYYYYYMDVWGKGTTVTVSSGGGGSGGGGSGGGGSGGDIQMTQSPSSLSASVGDRVTITCRASQSISSYLNWYQQKPGKAPKLLIYAASSLQSGVPSRFSGSGSGTDFTLTISSLQPEDFATYYCQQSYSTPLTFGGGTKVEIK

SEQ ID NO: 21747 - protein, 256 aa, Artificial Sequence
  HLA-C*07 antigen binding domain C7-6
QVQLQESGPGLVKPSQTLSLTCTVSGGSISSGGYYWSWIRQPPGKGLEWIGYIYYSGSTYYNPSLKSRVTISVDTSKNQFSLKLSSVTAADTAVYYCARESWKYFYPRGSIFIHYYYYMDVWGKGTTVTVSSGGGGSGGGGSGGGGSGGDIQMTQSPSSLSASVGDRVTITCRASQSISSYLNWYQQKPGKAPKLLIYAASSLQSGVPSRFSGSGSGTDFTLTISSLQPEDFATYYCQQSYSTPLTFGGGTKVEIK

SEQ ID NO: 21748 - protein, 248 aa, Artificial Sequence
  HLA-C*07 antigen binding domain C7-5
QVQLQESGPGLVKPSQTLSLTCTVSGGSISSGGYYWSWIRQPPGKGLEWIGYIYYSGSTYYNPSLKSRVTISVDTSKNQFSLKLSSVTAADTAVYYCARDRIVEVFYYYYMDVWGKGTTVTVSSGGGGSGGGGSGGGGSGGDIQMTQSPSSLSASVGDRVTITCRASQSISSYLNWYQQKPGKAPKLLIYAASSLQSGVPSRFSGSGSGTDFTLTISSLQPEDFATYYCQQSYSTPLTFGGGTKVEIK

SEQ ID NO: 21749 - protein, 250 aa, Artificial Sequence
  HLA-C*07 antigen binding domain C7-4
QVQLQESGPGLVKPSQTLSLTCTVSGGSISSGGYYWSWIRQPPGKGLEWIGYIYYSGSTYYNPSLKSRVTISVDTSKNQFSLKLSSVTAADTAVYYCAREKYFHDWLYYYYYMDVWGKGTTVTVSSGGGGSGGGGSGGGGSGGDIQMTQSPSSLSASVGDRVTITCRASQSISSYLNWYQQKPGKAPKLLIYAASSLQSGVPSRFSGSGSGTDFTLTISSLQPEDFATYYCQQSYSTPLTFGGGTKVEIK

SEQ ID NO: 21750 - protein, 250 aa, Artificial Sequence
  HLA-C*07 antigen binding domain C7-3
QVQLQESGPGLVKPSQTLSLTCTVSGGSISSGGYYWSWIRQPPGKGLEWIGYIYYSGSTYYNPSLKSRVTISVDTSKNQFSLKLSSVTAADTAVYYCARDLVDKNTSYYYYYMDVWGKGTTVTVSSGGGGSGGGGSGGGGSGGDIQMTQSPSSLSASVGDRVTITCRASQSISSYLNWYQQKPGKAPKLLIYAASSLQSGVPSRFSGSGSGTDFTLTISSLQPEDFATYYCQQSYSTPLTFGGGTKVEIK

SEQ ID NO: 21751 - protein, 244 aa, Artificial Sequence
  HLA-C*07 antigen binding domain C7-2
QVQLVQSGAEVKKPGASVKVSCKASGYTFTSYGISWVRQAPGQGLEWMGWISAYNGNTNYAQKLQGRVTMTTDTSTSTAYMELRSLRSDDTAVYYCARVQNEYFQHWGQGTLVTVSSGGGGSGGGGSGGGGSGGQSALTQPPSASGSPGQSVTISCTGTSSDVGGYNYVSWYQQHPGKAPKLMIYEVSKRPSGVPDRFSGSKSGNTASLTVSGLQAEDEADYYCSSYAGSNNWVFGGGTKLTVL

SEQ ID NO: 21752 - protein, 239 aa, Artificial Sequence
  HLA-C*07 antigen binding domain C7-1
QVQLVESGGGLVKPGGSLRLSCAASGFTFSDYYMSWIRQAPGKGLEWVSYISSSGSTIYYADSVKGRFTISRDNAKNSLYLQMNSLRAEDTAVYYCATANWFDPWGQGTLVTVSSGGGGSGGGGSGGGGSGGDIQMTQSPSSVSASVGDRVTITCRASQGISSWLAWYQQKPGKAPKLLIYAASSLQSGVPSRFSGSGSGTDFTLTISSLQPEDFATYYCQQANSFPLTFGGGTKVEIK

SEQ ID NO: 21753 - protein, 244 aa, Artificial Sequence
  HLA-A*03 scFv 15
QVQLVQSGAEVKKPGASVKVSCKASGYTFTSYGISWVRQAPGQGLEWMGWISAYNGNTNYAQKLQGRVTMTTDTSTSTAYMELRSLRSDDTAVYYCARERVSQRGAFDIWGQGTMVTVSSGGGGSGGGGSGGGGSGGDIQMTQSPSSLSASVGDRVTITCRASQSISSYLNWYQQKPGKAPKLLIYAASSLQSGVPSRFSGSGSGTDFTLTISSLQPEDFATYYCQQSYSTPLTFGGGTKVEIK

SEQ ID NO: 21754 - protein, 243 aa, Artificial Sequence
  HLA-A*03 scFv 16
EVQLVESGGGLVQPGGSLRLSCAASGFTFSSYSMNWVRQAPGKGLEWVSYISSSSSTIYYADSVKGRFTISRDNAKNSLYLQMNSLRAEDTAVYYCARGNPDKDPFDYWGQGTLVTVSSGGGGSGGGGSGGGGSGGDIQMTQSPSSLSASVGDRVTITCRASQSISSYLNWYQQKPGKAPKLLIYAASSLQSGVPSRFSGSGSGTDFTLTISSLQPEDFATYYCQQSYSTPLTFGGGTKVEIK

SEQ ID NO: 21755 - protein, 245 aa, Artificial Sequence
  HLA-A*03 scFv 17
QVQLQESGPGLVKPSETLSLTCTVSGGSVSSGSYYWSWIRQPPGKGLEWIGYIYYSGSTNYNPSLKSRVTISVDTSKNQFSLKLSSVTAADTAVYYCARDFYCTNWYFDLWGRGTLVTVSSGGGGSGGGGSGGGGSGGDIQMTQSPSSLSASVGDRVTITCRASQSISSYLNWYQQKPGKAPKLLIYAASSLQSGVPSRFSGSGSGTDFTLTISSLQPEDFATYYCQQSYSTPLTFGGGTKVEIK

SEQ ID NO: 21756 - protein, 244 aa, Artificial Sequence
  HLA-A*03 scFv 18
QVQLQESGPGLVKPSETLSLTCTVSGGSISSYYWSWIRQPPGKGLEWIGYIYYSGSTNYNPSLKSRVTISVDTSKNQFSLKLSSVTAADTAVYYCARESSSGSYWYFDLWGRGTLVTVSSGGGGSGGGGSGGGGSGGDIQMTQSPSSLSASVGDRVTITCRASQSISSYLNWYQQKPGKAPKLLIYAASSLQSGVPSRFSGSGSGTDFTLTISSLQPEDFATYYCQQSYSTPLTFGGGTKVEIK

SEQ ID NO: 21757 - protein, 250 aa, Artificial Sequence
  HLA-A*03 scFv 19
EVQLVQSGAEVKKPGESLKISCKGSGYSFTSYWIGWVRQMPGKGLEWMGIIYPGDSDTRYSPSFQGQVTISADKSISTAYLQWSSLKASDTAMYYCARDSGYKYNLYYYYYYMDVWGKGTTVTVSSGGGGSGGGGSGGGGSGGDIQMTQSPSSLSASVGDRVTITCRASQSISSYLNWYQQKPGKAPKLLIYAASSLQSGVPSRFSGSGSGTDFTLTISSLQPEDFATYYCQQSYSTPLTFGGGTKVEIK

SEQ ID NO: 21758 - protein, 249 aa, Artificial Sequence
  HLA-A*03 scFv 20
QVQLVQSGAEVKKPGASVKVSCKASGYTFTSYGISWVRQAPGQGLEWMGWISAYNGNTNYAQKLQGRVTMTTDTSTSTAYMELRSLRSDDTAVYYCARGGDLSHYYYYMDVWGKGTTVTVSSGGGGSGGGGSGGGGSGGQTVVTQEPSLTVSPGGTVTLTCASSTGAVTSGYYPNWFQQKPGQAPRALIYSTSNKHSWTPARFSGSLLGGKAALTLSGVQPEDEAEYYCLLYYGGAQWVFGGGTKLTVL

SEQ ID NO: 21759 - protein, 246 aa, Artificial Sequence
  HLA-A*03 scFv 21
QVQLVQSGAEVKKPGASVKVSCKASGYTFTSYGISWVRQAPGQGLEWMGWISAYNGNTNYAQKLQGRVTMTTDTSTSTAYMELRSLRSDDTAVYYCARENRRYNSCYYFDYWGQGTLVTVSSGGGGSGGGGSGGGGSGGDIQMTQSPSSLSASVGDRVTITCRASQSISSYLNWYQQKPGKAPKLLIYAASSLQSGVPSRFSGSGSGTDFTLTISSLQPEDFATYYCQQSYSTPLTFGGGTKVEIK

SEQ ID NO: 21760 - protein, 249 aa, Artificial Sequence
  HLA-A*03 scFv 22
QVQLVQSGAEVKKPGASVKVSCKASGYTFTSYGISWVRQAPGQGLEWMGWISAYNGNTNYAQKLQGRVTMTTDTSTSTAYMELRSLRSDDTAVYYCARGGDLSHYYYYLDVWGKGTTVTVSSGGGGSGGGGSGGGGSGGQTVVTQEPSLTVSPGGTVTLTCASSTGAVTSGYYPNWFQQKPGQAPRALIYSTSNKHSWTPARFSGSLLGGKAALTLSGVQPEDEAEYYCLLYYGGAQWVFGGGTKLTVL

SEQ ID NO: 21761 - protein, 245 aa, Artificial Sequence
  HLA-A*03 scFv 23
EVQLVESGGGLVQPGGSLRLSCAASGFTVSSNYMSWVRQAPGKGLEWVSVIYSGGSTYYADSVKGRFTISRDNSKNTLYLQMNSLRAEDTAVYYCARATLLSLSYDAFDIWGQGTMVTVSSGGGGSGGGGSGGGGSGGDIQMTQSPSSLSASVGDRVTITCRASQSISSYLNWYQQKPGKAPKLLIYAASSLQSGVPSRFSGSGSGTDFTLTISSLQPEDFATYYCQQSYSTPLTFGGGTKVEIK

SEQ ID NO: 21762 - protein, 248 aa, Artificial Sequence
  HLA-A*03 scFv 24
QVQLVQSGAEVKKPGASVKVSCKASGYTFTSYGISWVRQAPGQGLEWMGWISAYNGNTNYAQKLQGRVTMTTDTSTSTAYMELRSLRSDDTAVYYCARGGDLSHYYYMDVWGKGTTVTVSSGGGGSGGGGSGGGGSGGQTVVTQEPSLTVSPGGTVTLTCASSTGAVTSGYYPNWFQQKPGQAPRALIYSTSNKHSWTPARFSGSLLGGKAALTLSGVQPEDEAEYYCLLYYGGAQWVFGGGTKLTVL

SEQ ID NO: 21763 - protein, 241 aa, Artificial Sequence
  HLA-A*03 scFv 25
EVQLVQSGAEVKKPGESLKISCKGSGYSFTSYWIGWVRQMPGKGLEWMGIIYPGDSDTRYSPSFQGQVTISADKSISTAYLQWSSLKASDTAMYYCARERDRWFDPWGQGTLVTVSSGGGGSGGGGSGGGGSGGDIQMTQSPSSLSASVGDRVTITCRASQSISSYLNWYQQKPGKAPKLLIYAASSLQSGVPSRFSGSGSGTDFTLTISSLQPEDFATYYCQQSYSTPLTFGGGTKVEIK

SEQ ID NO: 21764 - protein, 247 aa, Artificial Sequence
  HLA-A*03 scFv 26
QVQLVQSGAEVKKPGASVKVSCKASGYTFTSYGISWVRQAPGQGLEWMGWISAYNGNTNYAQKLQGRVTMTTDTSTSTAYMELRSLRSDDTAVYYCARETPPSLGAFDIWGQGTMVTVSSGGGGSGGGGSGGGGSGGQSALTQPPSASGSPGQSVTISCTGTSSDVGGYNYVSWYQQHPGKAPKLMIYEVSKRPSGVPDRFSGSKSGNTASLTVSGLQAEDEADYYCSSYAGSNNWVFGGGTKLTVL

SEQ ID NO: 21765 - protein, 251 aa, Artificial Sequence
  HLA-A*03 scFv 27
QLQLQESGPGLVKPSETLSLTCTVSGGSISSSSYYWGWIRQPPGKGLEWIGSIYYSGSTYYNPSLKSRVTISVDTSKNQFSLKLSSVTAADTAVYYCAREAYCLSDSYWYFDLWGRGTLVTVSSGGGGSGGGGSGGGGSGGQSVLTQPPSASGTPGQRVTISCSGSSSNIGSNTVNWYQQLPGTAPKLLIYSNNQRPSGVPDRFSGSKSGTSASLAISGLQSEDEADYYCAAWDDSLNGWVFGGGTKLTVL

SEQ ID NO: 21766 - protein, 248 aa, Artificial Sequence
  HLA-A*03 scFv 28
QVQLQESGPGLVKPSQTLSLTCTVSGGSISSGGYYWSWIRQPPGKGLEWIGYIYYSGSTYYNPSLKSRVTISVDTSKNQFSLKLSSVTAADTAVYYCARESWKYFYPRGYMDVWGKGTTVTVSSGGGGSGGGGSGGGGSGGDIQMTQSPSSLSASVGDRVTITCRASQSISSYLNWYQQKPGKAPKLLIYAASSLQSGVPSRFSGSGSGTDFTLTISSLQPEDFATYYCQQSYSTPLTFGGGTKVEIK

SEQ ID NO: 21767 - protein, 248 aa, Artificial Sequence
  HLA-A*01 scFv A1-9
QVQLVQSGAEVKKPGASVKVSCKASGYTFTSYGISWVRQAPGQGLEWMGWISAYNGNTNYAQKLQGRVTMTTDTSTSTAYMELRSLRSDDTAVYYCARGGWTAWYYYMDVWGKGTTVTVSSGGGGSGGGGSGGGGSGGQTVVTQEPSLTVSPGGTVTLTCASSTGAVTSGYYPNWFQQKPGQAPRALIYSTSNKHSWTPARFSGSLLGGKAALTLSGVQPEDEAEYYCLLYYGGAQWVFGGGTKLTVL

SEQ ID NO: 21768 - protein, 244 aa, Artificial Sequence
  HLA-A*01 scFv A1-8
EVQLVESGGGLVQPGGSLRLSCAASGFTFSSYSMNWVRQAPGKGLEWVSYISSSSSTIYYADSVKGRFTISRDNAKNSLYLQMNSLRAEDTAVYYCARAKYYYMDVWGKGTTVTVSSGGGGSGGGGSGGGGSGGQSVLTQPPSASGTPGQRVTISCSGSSSNIGSNTVNWYQQLPGTAPKLLIYSNNQRPSGVPDRFSGSKSGTSASLAISGLQSEDEADYYCAAWDDSLNGWVFGGGTKLTVL

SEQ ID NO: 21769 - protein, 248 aa, Artificial Sequence
  HLA-A*01 scFv A1-7
QVQLQESGPGLVKPSQTLSLTCTVSGGSISSGGYYWSWIRQPPGKGLEWIGYIYYSGSTYYNPSLKSRVTISVDTSKNQFSLKLSSVTAADTAVYYCARDQVDKNTYYYYMDVWGKGTTVTVSSGGGGSGGGGSGGGGSGGDIQMTQSPSSLSASVGDRVTITCRASQSISSYLNWYQQKPGKAPKLLIYAASSLQSGVPSRFSGSGSGTDFTLTISSLQPEDFATYYCQQSYSTPLTFGGGTKVEIK

SEQ ID NO: 21770 - protein, 243 aa, Artificial Sequence
  HLA-A*01 scFv A1-6
QVQLVESGGGLVKPGGSLRLSCAASGFTFSDYYMSWIRQAPGKGLEWVSYISSSGSTIYYADSVKGRFTISRDNAKNSLYLQMNSLRAEDTAVYYCARACQLAEYFQHWGQGTLVTVSSGGGGSGGGGSGGGGSGGDIQMTQSPSSVSASVGDRVTITCRASQGISSWLAWYQQKPGKAPKLLIYAASSLQSGVPSRFSGSGSGTDFTLTISSLQPEDFATYYCQQANSFPLTFGGGTKVEIK

SEQ ID NO: 21771 - protein, 248 aa, Artificial Sequence
  HLA-A*01 scFv A1-5
QVQLQESGPGLVKPSQTLSLTCTVSGGSISSGGYYWSWIRQPPGKGLEWIGYIYYSGSTYYNPSLKSRVTISVDTSKNQFSLKLSSVTAADTAVYYCARDRVDKNTSYYYMDVWGKGTTVTVSSGGGGSGGGGSGGGGSGGDIQMTQSPSSLSASVGDRVTITCRASQSISSYLNWYQQKPGKAPKLLIYAASSLQSGVPSRFSGSGSGTDFTLTISSLQPEDFATYYCQQSYSTPLTFGGGTKVEIK

SEQ ID NO: 21772 - protein, 245 aa, Artificial Sequence
  HLA-A*01 scFv A1-4
QVQLQESGPGLVKPSDTLSLTCAVSGYSISSSNWWGWIRQPPGKGLEWIGYIYYSGSTYYNPSLKSRVTMSVDTSKNQFSLKLSSVTAVDTAVYYCARRVQLKLVHWFDPWGQGTLVTVSSGGGGSGGGGSGGGGSGGDIQMTQSPSSLSASVGDRVTITCRASQSISSYLNWYQQKPGKAPKLLIYAASSLQSGVPSRFSGSGSGTDFTLTISSLQPEDFATYYCQQSYSTPLTFGGGTKVEIK

SEQ ID NO: 21773 - protein, 245 aa, Artificial Sequence
  HLA-A*01 scFv A1-3
QVQLVQSGAEVKKPGASVKVSCKASGYTFTSYDINWVRQATGQGLEWMGWMNPNSGNTGYAQKFQGRVTMTRNTSISTAYMELSSLRSEDTAVYYCATYYDYVTVFYFQHWGQGTLVTVSSGGGGSGGGGSGGGGSGGDIQMTQSPSSLSASVGDRVTITCRASQSISSYLNWYQQKPGKAPKLLIYAASSLQSGVPSRFSGSGSGTDFTLTISSLQPEDFATYYCQQSYSTPLTFGGGTKVEIK

SEQ ID NO: 21774 - protein, 245 aa, Artificial Sequence
  HLA-A*01 scFv A1-2
QLQLQESGSGLVKPSQTLSLTCAVSGGSISSGGYSWSWIRQPPGKGLEWIGYIYHSGSTYYNPSLKSRVTISVDRSKNQFSLKLSSVTAADTAVYYCARESYPSFYAFDIWGQGTMVTVSSGGGGSGGGGSGGGGSGGDIQMTQSPSSLSASVGDRVTITCRASQSISSYLNWYQQKPGKAPKLLIYAASSLQSGVPSRFSGSGSGTDFTLTISSLQPEDFATYYCQQSYSTPLTFGGGTKVEIK

SEQ ID NO: 21775 - protein, 249 aa, Artificial Sequence
  HLA-A*01 scFv A1-1
QITLKESGPTLVKPTQTLTLTCTFSGFSLSTSGVGVGWIRQPPGKALEWLALIYWNDDKRYSPSLKSRLTITKDTSKNQVVLTMTNMDPVDTATYYCAHSNMWSYSLNDYYFDYWGQGTLVTVSSGGGGSGGGGSGGGGSGGDIQMTQSPSSLSASVGDRVTITCRASQSISSYLNWYQQKPGKAPKLLIYAASSLQSGVPSRFSGSGSGTDFTLTISSLQPEDFATYYCQQSYSTPLTFGGGTKVEIK

SEQ ID NO: 21776 - protein, 14 aa, Artificial Sequence
  CDR-L1
ASSTGAVTSGYYPN

SEQ ID NO: 21777 - protein, 13 aa, Artificial Sequence
  CDR-L1
SGSSSNIGSNTVN

SEQ ID NO: 21778 - protein, 11 aa, Artificial Sequence
  CDR-L1
RASENIYSNLA

SEQ ID NO: 21779 - protein, 7 aa, Artificial Sequence
  CDR-L2
STSNKHS

SEQ ID NO: 21780 - protein, 7 aa, Artificial Sequence
  CDR-L2
EVSKRPS

SEQ ID NO: 21781 - protein, 7 aa, Artificial Sequence
  CDR-L2
SNNQRPS

SEQ ID NO: 21782 - protein, 7 aa, Artificial Sequence
  CDR-L2
AATYLPD

SEQ ID NO: 21783 - protein, 10 aa, Artificial Sequence
  CDR-L3
LLYYGGAQWV

SEQ ID NO: 21784 - protein, 10 aa, Artificial Sequence
  CDR-L3
SSYAGSNNWV

SEQ ID NO: 21785 - protein, 11 aa, Artificial Sequence
  CDR-L3
AAWDDSLNGWV

SEQ ID NO: 21786 - protein, 9 aa, Artificial Sequence
  CDR-L3
QHFWVTPYT

SEQ ID NO: 21787 - protein, 9 aa, Artificial Sequence
  CDR-L3
QQYNSYPLT

SEQ ID NO: 21788 - protein, 5 aa, Artificial Sequence
  CDR-H1
SYWIG

SEQ ID NO: 21789 - protein, 6 aa, Artificial Sequence
  CDR-H1
SGYSWH

SEQ ID NO: 21790 - protein, 7 aa, Artificial Sequence
  CDR-H1
TSGVGVG

SEQ ID NO: 21791 - protein, 5 aa, Artificial Sequence
  CDR-H1
SYDMH

SEQ ID NO: 21792 - protein, 7 aa, Artificial Sequence
  CDR-H1
SNSAAWN

SEQ ID NO: 21793 - protein, 5 aa, Artificial Sequence
  CDR-H1
DYYMH

SEQ ID NO: 21794 - protein, 6 aa, Artificial Sequence
  CDR-H1
SSNWWG

SEQ ID NO: 21795 - protein, 17 aa, Artificial Sequence
  CDR-H2
IIYPGDSDTRYSPSFQG

SEQ ID NO: 21796 - protein, 16 aa, Artificial Sequence
  CDR-H2
YIHFSGSTHYHPSLKS

SEQ ID NO: 21797 - protein, 16 aa, Artificial Sequence
  CDR-H2
LIYWNDDKRYSPSLKS

SEQ ID NO: 21798 - protein, 16 aa, Artificial Sequence
  CDR-H2
AIGTAGDTYYPGSVKG

SEQ ID NO: 21799 - protein, 18 aa, Artificial Sequence
  CDR-H2
RTYYRSKWYNDYAVSVKS

SEQ ID NO: 21800 - protein, 17 aa, Artificial Sequence
  CDR-H2
LVDPEDGETIYAEKFQG

SEQ ID NO: 21801 - protein, 11 aa, Artificial Sequence
  CDR-H2
ERVSQRGAFDI

SEQ ID NO: 21802 - protein, 10 aa, Artificial Sequence
  CDR-H2
GNPDKDPFDY

SEQ ID NO: 21803 - protein, 11 aa, Artificial Sequence
  CDR-H2
DFYCTNWYFDL

SEQ ID NO: 21804 - protein, 12 aa, Artificial Sequence
  CDR-H2
ESSSGSYWYFDL

SEQ ID NO: 21805 - protein, 17 aa, Artificial Sequence
  CDR-H2
DSGYKYNLYYYYYYMDV

SEQ ID NO: 21806 - protein, 13 aa, Artificial Sequence
  CDR-H2
GGDLSHYYYYMDV

SEQ ID NO: 21807 - protein, 13 aa, Artificial Sequence
  CDR-H2
ENRRYNSCYYFDY

SEQ ID NO: 21808 - protein, 13 aa, Artificial Sequence
  CDR-H2
GGDLSHYYYYLDV

SEQ ID NO: 21809 - protein, 13 aa, Artificial Sequence
  CDR-H2
ATLLSLSYDAFDI

SEQ ID NO: 21810 - protein, 12 aa, Artificial Sequence
  CDR-H2
GGDLSHYYYMDV

SEQ ID NO: 21811 - protein, 8 aa, Artificial Sequence
  CDR-H2
ERDRWFDP

SEQ ID NO: 21812 - protein, 11 aa, Artificial Sequence
  CDR-H2
ETPPSLGAFDI

SEQ ID NO: 21813 - protein, 14 aa, Artificial Sequence
  CDR-H2
EAYCLSDSYWYFDL

SEQ ID NO: 21814 - protein, 14 aa, Artificial Sequence
  CDR-H2
ESWKYFYPRGYMDV

SEQ ID NO: 21815 - protein, 11 aa, Artificial Sequence
  CDR-H2
GGVVSHYAMDC

SEQ ID NO: 21816 - protein, 9 aa, Artificial Sequence
  CDR-H2
HYYYYYMDV

SEQ ID NO: 21817 - protein, 9 aa, Artificial Sequence
  CDR-H2
KTTSFYFDY

SEQ ID NO: 21818 - protein, 8 aa, Artificial Sequence
  CDR-H2
HYYYYMDV

SEQ ID NO: 21819 - protein, 10 aa, Artificial Sequence
  CDR-H2
GVLLYNWFDP

SEQ ID NO: 21820 - protein, 9 aa, Artificial Sequence
  CDR-H2
HYYYYYLDV

SEQ ID NO: 21821 - protein, 11 aa, Artificial Sequence
  CDR-H2
DLPGSYWYFDL

SEQ ID NO: 21822 - protein, 12 aa, Artificial Sequence
  CDR-H2
EGNGANPDAFDI

SEQ ID NO: 21823 - protein, 10 aa, Artificial Sequence
  CDR-H2
RHMRLSCFDY

SEQ ID NO: 21824 - protein, 9 aa, Artificial Sequence
  CDR-H2
HYYYYSMDV

SEQ ID NO: 21825 - protein, 7 aa, Artificial Sequence
  CDR-H2
SFDWFDP

SEQ ID NO: 21826 - protein, 14 aa, Artificial Sequence
  CDR-H2
ERSISPYYYYYMDV

SEQ ID NO: 21827 - protein, 10 aa, Artificial Sequence
  CDR-H2
DSVIWYWFDP

SEQ ID NO: 21828 - protein, 15 aa, Artificial Sequence
  CDR-H2
EEILPRLSYYYYMDV

SEQ ID NO: 21829 - protein, 12 aa, Artificial Sequence
  CDR-H2
GGRAHSSWYFDL

SEQ ID NO: 21830 - protein, 17 aa, Artificial Sequence
  CDR-H3
DRIKILPRLGYYYYMDV

SEQ ID NO: 21831 - protein, 12 aa, Artificial Sequence
  CDR-H3
DTVIHYYYYMDV

SEQ ID NO: 21832 - protein, 16 aa, Artificial Sequence
  CDR-H3
DVIVEVFLSYYYYMDV

SEQ ID NO: 21833 - protein, 12 aa, Artificial Sequence
  CDR-H3
DIFIHYYYYMDV

SEQ ID NO: 21834 - protein, 14 aa, Artificial Sequence
  CDR-H3
DGTFYSYSPYYFDY

SEQ ID NO: 21835 - protein, 17 aa, Artificial Sequence
  CDR-H3
EWIKILPRLGYYYYMDV

SEQ ID NO: 21836 - protein, 12 aa, Artificial Sequence
  CDR-H3
DRSLYYYYYMDV

SEQ ID NO: 21837 - protein, 14 aa, Artificial Sequence
  CDR-H3
DKILAPNYYYYMDV

SEQ ID NO: 21838 - protein, 16 aa, Artificial Sequence
  CDR-H3
EKSWKYFYYYYYYMDV

SEQ ID NO: 21839 - protein, 15 aa, Artificial Sequence
  CDR-H3
ENTSTIPYYYYYMDV

SEQ ID NO: 21840 - protein, 19 aa, Artificial Sequence
  CDR-H3
EDVDKNTSTIYYYYYYMDV

SEQ ID NO: 21841 - protein, 17 aa, Artificial Sequence
  CDR-H3
DGGDIVSSSAIYWYFDL

SEQ ID NO: 21842 - protein, 14 aa, Artificial Sequence
  CDR-H3
DLILPPYYYYYMDV

SEQ ID NO: 21843 - protein, 19 aa, Artificial Sequence
  CDR-H3
ETWIKILPRYYYYYYYMDV

SEQ ID NO: 21844 - protein, 12 aa, Artificial Sequence
  CDR-H3
DLSRYYYYYMDV

SEQ ID NO: 21845 - protein, 9 aa, Artificial Sequence
  CDR-H3
EHIVLCFDY

SEQ ID NO: 21846 - protein, 15 aa, Artificial Sequence
  CDR-H3
DKILPRPYYYYYMDV

SEQ ID NO: 21847 - protein, 8 aa, Artificial Sequence
  CDR-H3
GSNEYFQH

SEQ ID NO: 21848 - protein, 9 aa, Artificial Sequence
  CDR-H3
GTSYWYFDL

SEQ ID NO: 21849 - protein, 14 aa, Artificial Sequence
  CDR-H3
EEIVEVFYYYYMDV

SEQ ID NO: 21850 - protein, 8 aa, Artificial Sequence
  CDR-H3
VDDYYFDY

SEQ ID NO: 21851 - protein, 14 aa, Artificial Sequence
  CDR-H3
STNILLSYTKAFDI

SEQ ID NO: 21852 - protein, 12 aa, Artificial Sequence
  CDR-H3
DKTYYYYYYMDV

SEQ ID NO: 21853 - protein, 19 aa, Artificial Sequence
  CDR-H3
EKYFHDKYFHDYYYYYMDV

SEQ ID NO: 21854 - protein, 12 aa, Artificial Sequence
  CDR-H3
DTSVYYYYYMDV

SEQ ID NO: 21855 - protein, 14 aa, Artificial Sequence
  CDR-H3
EKILPYYYYYYMDV

SEQ ID NO: 21856 - protein, 21 aa, Artificial Sequence
  CDR-H3
QWIYIYINPRGFIFLHDAFDI

SEQ ID NO: 21857 - protein, 12 aa, Artificial Sequence
  CDR-H3
EDVDFHHDAFDI

SEQ ID NO: 21858 - protein, 19 aa, Artificial Sequence
  CDR-H3
EGVDKNTSTIYYYYYYMDV

SEQ ID NO: 21859 - protein, 8 aa, Artificial Sequence
  CDR-H3
DRRGYFDL

SEQ ID NO: 21860 - protein, 15 aa, Artificial Sequence
  CDR-H3
GIHVDIRSMEDWFDP

SEQ ID NO: 21861 - protein, 12 aa, Artificial Sequence
  CDR-H3
DIGTSYYYYMDV

SEQ ID NO: 21862 - protein, 15 aa, Artificial Sequence
  CDR-H3
EVVEVFLYYYYYMDV

SEQ ID NO: 21863 - protein, 12 aa, Artificial Sequence
  CDR-H3
DLYYYYYYYMDV

SEQ ID NO: 21864 - protein, 22 aa, Artificial Sequence
  CDR-H3
ESWKYFYPRGSIFIHYYYYMDV

SEQ ID NO: 21865 - protein, 14 aa, Artificial Sequence
  CDR-H3
DRIVEVFYYYYMDV

SEQ ID NO: 21866 - protein, 16 aa, Artificial Sequence
  CDR-H3
EKYFHDWLYYYYYMDV

SEQ ID NO: 21867 - protein, 16 aa, Artificial Sequence
  CDR-H3
DLVDKNTSYYYYYMDV

SEQ ID NO: 21868 - protein, 8 aa, Artificial Sequence
  CDR-H3
VQNEYFQH

SEQ ID NO: 21869 - protein, 6 aa, Artificial Sequence
  CDR-H3
ANWFDP

SEQ ID NO: 21870 - protein, 12 aa, Artificial Sequence
  CDR-H3
GGWTAWYYYMDV

SEQ ID NO: 21871 - protein, 8 aa, Artificial Sequence
  CDR-H3
AKYYYMDV

SEQ ID NO: 21872 - protein, 14 aa, Artificial Sequence
  CDR-H3
DQVDKNTYYYYMDV

SEQ ID NO: 21873 - protein, 10 aa, Artificial Sequence
  CDR-H3
ACQLAEYFQH

SEQ ID NO: 21874 - protein, 14 aa, Artificial Sequence
  CDR-H3
DRVDKNTSYYYMDV

SEQ ID NO: 21875 - protein, 12 aa, Artificial Sequence
  CDR-H3
RVQLKLVHWFDP

SEQ ID NO: 21876 - protein, 12 aa, Artificial Sequence
  CDR-H3
YYDYVTVFYFQH

SEQ ID NO: 21877 - protein, 11 aa, Artificial Sequence
  CDR-H3
ESYPSFYAFDI

SEQ ID NO: 21878 - protein, 15 aa, Artificial Sequence
  CDR-H3
SNMWSYSLNDYYFDY

SEQ ID NO: 21879 - DNA, 20 bp, Artificial Sequence
  HLA-A targeting gRNA
tggacgacacgcagttcgtg

SEQ ID NO: 21880 - DNA, 20 bp, Artificial Sequence
  HLA-A targeting gRNA
cagatacctggagaacggga

SEQ ID NO: 21881 - DNA, 20 bp, Artificial Sequence
  HLA-A targeting gRNA
tcccgttctccaggtatctg

SEQ ID NO: 21882 - DNA, 20 bp, Artificial Sequence
  HLA-A targeting gRNA
ccgccgcggtccaagagcgc

SEQ ID NO: 21883 - DNA, 20 bp, Artificial Sequence
  HLA-A targeting gRNA
cctgcgctcttggaccgcgg

SEQ ID NO: 21884 - DNA, 21 bp, Artificial Sequence
  HLA-A targeting gRNA
ggacctgcgctcttggaccgc

SEQ ID NO: 21885 - DNA, 6 bp, Artificial Sequence
  TCR alpha intracellular domain
tccagc

SEQ ID NO: 21886 - protein, 41 aa, Artificial Sequence; identical to SEQ ID NO: 13
  CD28 intracellular domain

SEQ ID NO: 21887 - protein, 123 aa, Artificial Sequence
  CD28 intracellular domain
AGGAGCAAGCGGAGCAGACTGCTGCACAGCGACTACATGAACATGACCCCCCGGAGGCCTGGCCCCACCCGGAAGCACTACCAGCCCTACGCCCCTCCCAGGGATTTCGCCGCCTACCGGAGC

SEQ ID NO: 21888 - protein, 12 aa, Artificial Sequence
  HLA-A02 Binder LCDR2
KVSNRFSGVPDR

SEQ ID NO: 21889 - protein, 16 aa, Artificial Sequence
  EGFR Binder LCDR1
RSSQSLVHSNGNTYLH

SEQ ID NO: 21890 - protein, 245 aa, Artificial Sequence; identical to SEQ ID NO: 220
  C-002300 (K14A11:01 H001/L004_scFv)

SEQ ID NO: 21891 - protein, 244 aa, Artificial Sequence
  C-002301 (K14A11:01 H001/L010 scFv)
QVTLRESGPALVKPTQTLTLTCTFSGFSLSTSGMCVSWIRQPPGKALEWLALIDWDDDKYYSTSLKTRLTISKDTSKNQVVLTMTNMDPVDTATYYCARSYDELYYFDYWGQGTLVTVSSGGGGSGGGGSGGGGSGGDIQMTQSPSSLSASVGDRVTITCRASQSISSYLNWYQQKPGKAPKLLIYAASSLQSGVPSRFSGSGSGTDFTLTISSLQPEDFATYYCQQSYSTRLTFGGGTKVEIK

SEQ ID NO: 21892 - protein, 283 aa, Artificial Sequence; identical to SEQ ID NO: 236
  C-002368 [pLenti 1 K33A1101_V002 TCRb S51C (TRBV12-2*01)]

SEQ ID NO: 21893 - protein, 272 aa, Artificial Sequence; identical to SEQ ID NO: 241
  C-002372 [pLenti 1 Kp514A1101_V001 TCRb S51C (TRBV4*01)]

SEQ ID NO: 21894 - protein, 244 aa, Artificial Sequence; identical to SEQ ID NO: 234
  C-002366 [pLenti 1 K33A1101_V002 TCRa T48C (G12D TRAV4-4/DV10*01)]

SEQ ID NO: 21895 - protein, 248 aa, Artificial Sequence; identical to SEQ ID NO: 239
  C-002370 [pLenti 1 Kp514A1101_V001 TCRa T48C (G12 V TRAV3-3*01)]

SEQ ID NO: 21896 - protein, 10 aa, Artificial Sequence
  UGT2B17/B44
AELLNIPFLY

SEQ ID NO: 21897 - DNA, 360 bp, Artificial Sequence; identical to SEQ ID NO: 382
  B2M CDS GenBank AY187687

SEQ ID NO: 21898 - DNA, 360 bp, Artificial Sequence; identical to SEQ ID NO: 382
  B2M CDS GenBank AY187687

SEQ ID NO: 21899 - DNA, 502 bp, Artificial Sequence; identical to SEQ ID NO: 8472
  B2M mRNA

SEQ ID NO: 21900 - DNA, 46 bp, Artificial Sequence
  B2M shRNA
gcactcaaagcttgttaagatcgaaatcttaacaagctttgagtgc

SEQ ID NO: 21901 - DNA, 46 bp, Artificial Sequence
  B2M shRNA
gttaacttccaatttacataccgaagtatgtaaattggaagttaac

SEQ ID NO: 21902 - protein, 522 aa, Artificial Sequence
  inhibitory receptor
MDMRVPAQLLGLLLLWLRGARCDVLMTQTPLSLPVSLGDQASISCRSSQSIVHSNGNTYLEWYLQKPGQSPKLLIYKVSNRFSGVPDRFSGSGSGTDFTLKISRVEAEDLGVYYCFQGSHVPRTSGGGTKLEIKGGGGSGGGGSGGGGSGGQVQLQQSGPELVKPGASVRISCKASGYTFTSYHIHWVKQRPGQGLEWIGWIYPGNVNTEYNEKFKGKATLTADKSSSTAYMHLSSLTSEDSAVYFCAREEITYAMDYWGQGTSVTVSSYGSQSSKPYLLTHPSDPLELVVSGPSGGPSSPTTGPTSTSGPEDQPLTPTGSDPQSGLGRHLGVVIGILVAVILLLLLLLLLFLILRHRRQGKHWTSTQRKADFQHPAGAVGPEPTDRGLQWRSSPAADAQEENLYAAVKHTQPEDGVEMDTRSPHDEDPQAVTYAEVKHSRPRREMASPPSPLSGEFLDTKDRQAEEDRQMDTEAAASEAPQDVTYAQLHSLTLRREATEPPPSQEGPSPAVPSIYATLAIH

SEQ ID NO: 21903 - protein, 195 aa, Artificial Sequence
  intracellular domain
RSKRSRLLHSDYMNMTPRRPGPTRKHYQPYAPPRDFAAYRSKRGRKKLLYIFKQPFMRPVQTTQEEDGCSCRFPEEEEGGCELRVKFSRSADAPAYKQGQNQLYNELNLGRREEYDVLDKRRGRDPEMGGKPRRKNPQEGLYNELQKDKMAEAYSEIGMKGERRRGKGHDGLYQGLSTATKDTYDALHMQALPPR

SEQ ID NO: 21904 - DNA, 585 bp, Artificial Sequence
  intracellular domain
aggagcaagcggagtcgactgctgcacagcgactacatgaacatgaccccccggaggcctggccccacccggaagcactaccagccctacgcccctcccagggatttcgccgcctaccggagcaaacggggcagaaagaaactcctgtatatattcaaacaaccatttatgaggccagtacaaactactcaagaggaagatggctgtagctgccgatttccagaagaagaagaaggaggatgtgaactgagagtgaagttcagcaggagcgcagacgcccccgcgtacaagcagggccagaaccagctctataacgagctcaatctaggacgaagagaggagtacgatgttttggacaagcgtagaggccgggaccctgagatggggggaaagccgagaaggaagaaccctcaggaaggcctgtacaatgaactgcagaaagataagatggcggaggcctacagtgagattgggatgaaaggcgagcgccggaggggcaaggggcacgatggcctttaccagggactcagtacagccaccaaggacacctacgacgcccttcacatgcaggccctgccccctcgc

SEQ ID NO: 21905 - protein, 22 aa, Artificial Sequence
  P2A peptide
VKQTLNFDLLKLAGDVESNPGP

What is claimed is:

1. An allogeneic immune cell comprising:
a. a first engineered receptor, the first engineered receptor comprising a transmembrane region and an extracellular region, the extracellular region comprising a first ligand binding domain capable of specifically binding a first ligand; and
b. a second engineered receptor, the second engineered receptor comprising a transmembrane region and an extracellular region, the extracellular region comprising a second ligand binding domain capable of specifically binding a second ligand,
wherein binding of the first ligand binding domain to the first ligand activates or promotes activation of the immune cell by the first receptor,
wherein binding of the second ligand binding domain to the second ligand inhibits activation of the immune cell by the first receptor, and
wherein the second ligand is expressed by a host immune cell.

2. The allogeneic immune cell of claim 1, wherein the allogeneic immune cell expresses one or more endogenous T cell receptors (TCRs).

3. The allogeneic immune cell of claim 2, wherein the allogeneic immune cell has not been modified to reduce or eliminate the expression of an endogenous TRCA, TRB, CD3D, CD3E, CD3G and/or CD3Z gene product.

4. The allogeneic immune cell of claim 2 or 3, wherein binding of the second ligand binding domain to the second ligand inhibits activation of the immune cell by the endogenous TCR.

5. The allogeneic immune cell of claim 4, wherein expression of the second engineered receptor reduces graft versus host disease when a plurality of the allogeneic immune cells are administered to a subject.

6. The allogeneic immune cell of any one of claims 1-5, comprising a first modification that reduces or eliminates expression or function of a component of the major histocompatibility complex class I (MHC I).

7. The allogeneic immune cell of claim 6, wherein the component of MHC I is human leukocyte antigen A (HLA-A), human leukocyte antigen B (HLA-B), human leukocyte antigen C (HLA-C) or beta-2-microglobulin (B2M).

8. The allogeneic immune cell of claim 6 or 7, wherein the first modification comprises a genetic modification of a HLA-A, HLA-B, HLA-C or B2M locus of the allogeneic immune cell genome.

9. The allogeneic immune cell of claim 8, wherein the genetic modification comprises a deletion, insertion, substitution or frameshift mutation in the HLA-A, HLA-B, HLA-C or B2M locus.

10. The allogeneic immune cell of claim 6-9, wherein the first modification reduces expression of a functional protein encoded by the HLA-A, HLA-B, HLA-C or B2M locus.

11. The allogeneic immune cell of claim of any one of claims 6-10, wherein the first modification comprises using a nucleic acid guided endonuclease, a zinc finger nuclease or a TALEN.

12. The allogeneic immune cell of claim 11, wherein the nucleic acid guided endonuclease is selected from the group consisting of Cas1, Cas1B, Cas2, Cas3, Cas4, Cas5, Cas6, Cas7, Cas8, Cas9, Cas10, Csy1, Csy2, Csy3, Cse1, Cse2, Csc1, Csc2, Csa5, Csn2, Csm2, Csm3, Csm4, Csm5, Csm6, Cmr1, Cmr3, Cmr4, Cmr5, Cmr6, Csb1, Csb2, Csb3, Csx17, Csx14, Csx10, Csx16, CsaX, CasY, Csx3, Csx1, Csx15, Csf1, Csf2, Csf3, and Csf4.

13. The allogeneic immune cell of claim 11, wherein the nucleic acid guided endonuclease is Cas9.

14. The allogeneic immune cell of any one of claims 11-13, wherein the allogeneic immune cell is modified with a nucleic acid guided endonuclease in a complex with a guide nucleic acid (gNA) that specifically targets a sequence of the HLA-A, HLA-B, HLA-C or B2M locus.

15. The allogeneic immune cell of any one of claims 11-13, wherein the allogeneic immune cell is modified with a nucleic acid guided endonuclease in a complex with at least one guide gNA that specifically targets a sequence within the B2M locus and/or a promoter of the B2M gene.

16. The allogeneic immune cell of claim 15, wherein the at least one gNA comprises a sequence that shares about 80%, about 85%, about 90%, about 95%, about 96%, about 97%, about 98%, or about 99% identity to a sequence selected from the group consisting of SEQ ID NOs: 8357-8470.

17. The allogeneic immune cell of claim 15, wherein the at least one gNA comprises a sequence selected from the group consisting of SEQ ID NOs: 8357-8470.

18. The allogeneic immune cell of claim 15, wherein the at least one gNA specifically targets a coding sequence (CDS) of the B2M gene.

19. The allogeneic immune cell of claim 18, wherein the at least one gNA comprises a sequence that shares about 80%, about 85%, about 90%, about 95%, about 96%, about 97%, about 98%, or about 99% identity to a sequence selected from the group consisting of SEQ ID NOs: 8357-8397.

20. The allogeneic immune cell of claim 18, wherein the gNA comprises a sequence selected from the group consisting of SEQ ID NOs: 8357-8397.

21. The allogeneic immune cell of any one of claims 11-13, wherein the allogeneic immune cell is modified with a nucleic acid guided endonuclease in a complex with at least one guide gNA that specifically targets a sequence within the HLA-A locus and/or a promoter of the HLA-A gene.

22. The allogeneic immune cell of claim 21, wherein the at least one gNA is specific to a target sequence that shares about 90%, about 95%, about 96%, about 97%, about 98%, or about 99% identity to a sequence selected from the group consisting of SEQ ID NOs: 390-3276.

23. The allogeneic immune cell of claim 21, wherein the at least one gNA is specific to a target sequence selected from the group consisting of SEQ ID NOs: 390-3276.

24. The allogeneic immune cell of claim 21, wherein the allogeneic immune cell is modified with a nucleic acid guided endonuclease in a complex with at least one gNA that specifically targets a sequence of HLA-A*02 alleles.

25. The allogeneic immune cell of claim 24, wherein the at least one gNA is specific to a target sequence that shares about 90%, about 95%, about 96%, about 97%, about 98%, or about 99% identity to a sequence selected from the group consisting of SEQ ID NOs: 390-1585.

26. The allogeneic immune cell of claim 24, wherein the at least one gNA is specific to a target sequence selected from the group consisting of SEQ ID NOs: 390-1585.

27. The allogeneic immune cell claim 21, wherein the allogeneic immune cell is modified with a nucleic acid guided endonuclease in a complex with at least one gNA that specifically targets a sequence of HLA-A*02:01 alleles.

28. The allogeneic immune cell of claim 27, wherein the at least one gNA is specific to a sequence that shares about 90%, about 95%, about 96%, about 97%, about 98%, or about 99% identity to target a sequence selected from the group consisting of SEQ ID NOs: 390-1174.

29. The allogeneic immune cell of claim 27, wherein the at least one gNA is specific to a target sequence selected from the group consisting of SEQ ID NOs: 390-1174.

30. The allogeneic immune cell of claim 21, wherein the allogeneic immune cell is modified with a nucleic acid guided endonuclease in a complex with at least one gNA that specifically targets a sequence of HLA-A*02:01:01 alleles.

31. The allogeneic immune cell of claim 30, wherein the at least one gNA is specific to a target sequence that shares about 90%, about 95%, about 96%, about 97%, about 98%, or about 99% identity to a sequence selected from the group consisting of SEQ ID NOs: 390-1166.

32. The allogeneic immune cell of claim 30, wherein the at least one gNA is specific to a target sequence selected from the group consisting of SEQ ID NOs: 390-1166.

33. The allogeneic immune cell of claim 21, wherein the allogeneic immune cell is modified with a nucleic acid guided endonuclease in a complex with at least one gNA that specifically targets a sequence of HLA-A*02:01:01:01 alleles.

34. The allogeneic immune cell of claim 33, wherein the at least one gNA is specific to a target sequence that shares about 90%, about 95%, about 96%, about 97%, about 98%, or about 99% identity to a sequence selected from the group consisting of SEQ ID NOs: 390-1126.

35. The allogeneic immune cell of claim 33, wherein the at least one gNA is specific to a target sequence selected from the group consisting of SEQ ID NOs: 390-1126.

36. The allogeneic immune cell of claim 21, wherein the allogeneic immune cell is modified with a nucleic acid guided endonuclease in a complex with at least one guide nucleic acid (gNA) that specifically targets a coding DNA sequence of HLA-A*02.

37. The allogeneic immune cell of claim 36, wherein the at least gNA is specific to a target sequence that shares about 90%, about 95%, about 96%, about 97%, about 98%, or about 99% identity to a sequence selected from the group consisting of SEQ ID NOs: 390-509.

38. The allogeneic immune cell of claim 36, wherein the at least one gNA is specific to a target sequence selected from the group consisting of SEQ ID NOs: 390-509.

39. The allogeneic immune cell of claim 21, wherein the immune cell is modified with a nucleic acid guided endonuclease in a complex with at least one gNA that specifically targets a coding DNA sequence that is shared by more than 1000 HLA-A*02 alleles.

40. The allogeneic immune cell of claim 39, wherein the at least one gNA is specific to a target sequence that shares about 90%, about 95%, about 96%, about 97%, about 98%, or about 99% identity to a sequence selected from the group consisting of SEQ ID NOs: 390-455.

41. The allogeneic immune cell of claim 39, wherein the at least one gNA is specific to a target sequence selected from the group consisting of SEQ ID NOs: 390-455.

42. The allogeneic immune cell of claim 6, wherein the first modification comprises expression of an interfering RNA.

43. The allogeneic immune cell of claim 42, wherein the interfering RNA is a small interfering RNA (siRNA), a short hairpin RNA (shRNA) or a microRNA.

44. The allogeneic immune cell of claim 42 or 43, wherein the interfering RNA comprises a sequence complementary to a target sequence of HLA-A, HLA-B, HLA-C or B2M.

45. The allogeneic immune cell of claim 44, wherein the target sequence of HLA-A, HLA-B, HLA-C or B2M is between 18 and 27 bp in length.

46. The allogeneic of any one of claims 42-45, wherein the interfering RNA comprises an shRNA capable of inducing RNAi-mediated degradation of an HLA-A*02:01:01 mRNA.

47. The allogeneic immune cell of claim 46, wherein the shRNA comprises
a. a first sequence, having from 5′ end to 3′ end a sequence complementary to the HLA-A*02:01:01:01 mRNA; and
b. a second sequence, having from 5′ end to 3′ end a sequence complementary to the first sequence,
wherein the first sequence and the second sequence form the shRNA.

48. The allogeneic immune cell of claim 46 or 47, wherein the first sequence is 18, 19, 21, or 22 nucleotides.

49. The allogeneic immune cell of claim 48, wherein the first sequence is complementary to a sequence selected from SEQ ID NOs: 8476-16870.

50. The allogeneic immune cell of any one of claims 47-49, wherein the first sequence and second sequence are present on a single stranded polynucleotide, wherein the first sequence and second sequence are separated by 4, 5, 6, 7, 8, 9, 10, 11, 12, 13, 14, or 15 nucleotides, wherein the 4, 5, 6, 7, 8, 9, 10, 11, 12, 13, 14, or 15 nucleotides form a loop region in the shRNA.

51. The immune allogeneic cell of claim 50, wherein the loop region comprises a sequence selected from SEQ ID NOs: 16872-16884 and 16895.

52. The allogeneic immune cell of any one of claims 47-51, wherein the shRNA further comprises a 5′ flank sequence and a 3′ flank sequence, wherein the 5′ flank sequence is joined to the 5′ end of the first sequence, and wherein the 3′ flank sequence is joined to the 3′ end of the second sequence.

53. The allogeneic immune cell of claim 52, wherein the 5′ flank sequence is selected from the group consisting of SEQ ID NO: 16885-16887.

54. The allogeneic immune cell of claim 52 or 53, wherein the 3′ flank sequence is selected from the group consisting of SEQ ID NO: 16888, 16889, and 16896.

55. The allogeneic of any one of claims 42-45, wherein the interfering RNA comprises an shRNA capable of inducing RNAi-mediated degradation of a B2M mRNA.

56. The allogeneic immune cell of claim 55, wherein the shRNA comprises
a. a first sequence, having from 5′ end to 3′ end a sequence complementary to the B2M mRNA; and
b. a second sequence, having from 5′ end to 3′ end a sequence complementary to the first sequence,
wherein the first sequence and the second sequence form the shRNA.

57. The allogeneic immune cell of claim 56, wherein the first sequence is complementary to a sequence selected from SEQ ID NOs: 16897-21508, 847-8474, and 8368-8370.

58. The allogeneic immune cell of claim 56, wherein the first sequence is complementary to a sequence selected from the group consisting of SEQ ID NOs: 16897-20484.

59. The allogeneic immune cell of claim 56, wherein the first sequence is complementary to a sequence selected from the group consisting of SEQ ID NOs: 16897-19888.

60. The allogeneic immune cell of claim 56, wherein the first sequence is complementary to a sequence selected from the group consisting of SEQ ID NOs: 16897-17478.

61. The allogeneic immune cell of claim 56, wherein the first sequence is selected from the group consisting of SEQ ID NOs: 16897-17178 or SEQ ID NOs: 16897-17034.

62. The allogeneic immune cell of any one of claims 56-61, wherein the first sequence and second sequence are present on a single stranded polynucleotide, wherein the first sequence and second sequence are separated by 4, 5, 6, 7, 8, 9, 10, 11, 12, 13, 14, or 15 nucleotides, wherein the 4, 5, 6, 7, 8, 9, 10, 11, 12, 13, 14, or 15 nucleotides form a loop region in the shRNA.

63. The allogeneic immune cell of claim 62, wherein the loop region comprises a sequence selected from SEQ ID NOs: 16872-16884, and 16895.

64. The allogeneic immune cell of any one of claims 56-63, wherein the shRNA further comprises a 5′ flank sequence and a 3′ flank sequence, wherein the 5′ flank sequence is joined to the 5′ end of the first sequence, and wherein the 3′ flank sequence is joined to the 3′ end of the second sequence.

65. The allogeneic immune cell of claim 64, wherein the 5′ flank sequence is selected from SEQ ID NO: 16885-16887 and 16894.

66. The allogeneic immune cell of claim 65 or 66, wherein the 3′ flank sequence is selected from SEQ ID NO: 16888, 16889, and 16896.

67. The allogeneic immune cell of claim 56, wherein the shRNA comprises SEQ ID NOs: 21899-21901.

68. The allogeneic immune cell of any one of claims 42-67, wherein the interfering RNA is operably linked to a promoter.

69. The allogeneic immune cell of any one of claims 1-68, comprising a second modification that reduces or eliminates expression or function of CD52.

70. The allogeneic immune cell of claim 69, wherein the second modification comprises a deletion, insertion, substitution or frameshift mutation in the CD52 locus of the allogeneic immune cell genome.

71. The allogeneic immune cell of claim of claim 69 or 70, wherein the second modification comprises using a nucleic acid guided endonuclease, a zinc finger nuclease or a TALEN.

72. The allogeneic immune cell of claim 69, wherein the second modification comprises expression of an interfering RNA.

73. The allogeneic immune cell of claim 72, wherein the interfering RNA is a small interfering RNA (siRNA), a short hairpin RNA (shRNA) or a microRNA.

74. The allogeneic immune cell of claim 72 or 73, wherein the interfering RNA comprises a sequence complementary to a target sequence of CD52.

75. The allogeneic immune cell of any one of claims 1-74, comprising a third modification that reduces targeting of the allogeneic immune cell by NK cells of a subject.

76. The allogeneic immune cell of claim 75, wherein the third modification comprises overexpression of HLA-E, HLA-G or NKG2A.

77. The allogeneic immune cell of any one of claims 1-76, wherein the second ligand is not expressed in a target cell due to loss of heterozygosity of a gene encoding the second ligand.

78. The allogeneic immune cell of any one of claims 1-76, wherein the first ligand and second ligand are not the same.

79. The allogeneic immune cell of any one of claims 1-78, wherein the first ligand is expressed by target cells.

80. The allogeneic immune cell of any one of claims 1-79, wherein the first ligand is expressed by target cells and a plurality of non-target cells.

81. The allogeneic immune cell of claim 80, wherein the plurality of non-target cells express both the first and second ligands.

82. The allogeneic immune cell of any one of claims 1-81, wherein the second ligand is not expressed by the target cells, and is expressed by the plurality of non-target cells.

83. The allogeneic immune cell of any one of claims 80-82, wherein the target cells are cancer cells and the non-target cells are non-cancerous cells.

84. The allogeneic immune cell of any one of claims 1-83, wherein the first ligand is selected from the group consisting of a cell adhesion molecule, a cell-cell signaling molecule, an extracellular domain, a molecule involved in chemotaxis, a glycoprotein, a G protein-coupled receptor, a transmembrane protein, a receptor for a neurotransmitter and a voltage gated ion channel, or a peptide antigen thereof.

85. The allogeneic immune cell of any one of claims 1-83, wherein the first ligand is a cancer antigen.

86. The allogeneic immune cell of any one of claims 1-83, wherein the first ligand is selected from the group of antigens in Table 1.

87. The allogeneic immune cell of claim 86, wherein the first ligand binding domain is isolated or derived from the antigen binding domain of an antibody in Table 1.

88. The allogeneic immune cell of any one of claims 1-83, wherein the first ligand is selected from the group consisting of transferrin receptor (TFRC), epidermal growth factor receptor (EGFR), CEA cell adhesion molecule 5 (CEA), CD19 molecule (CD19), erb-b2 receptor tyrosine kinase 2 (HER2), and mesothelin (MSLN), or a peptide antigen thereof.

89. The allogeneic immune cell of any one of claims 1-83, wherein the first ligand is a pan-HLA ligand.

90. The allogeneic immune cell of any one of claims 1-83, wherein the first ligand comprises HLA-A, HLA-B, HLA-C, HLA-E, HLA-F, of HLA-G.

91. The allogeneic immune cell of any one of claims 1-90, wherein the first engineered receptor is a T cell receptor (TCR) or a chimeric antigen receptor (CAR).

92. The allogeneic immune cell of any one of claims 1-91, wherein the second engineered receptor is a T cell receptor (TCR) or a chimeric antigen receptor (CAR).

93. The allogeneic immune cell of any one of claims 1-92, wherein the first ligand binding domain comprises a single chain FAT antibody fragment (ScFv) or a β chain variable domain (Vβ).

94. The allogeneic immune cell of any one of claims 1-92, wherein the first ligand binding domain comprises a TCR α chain variable domain and a TCR β chain variable domain.

95. The allogeneic immune cell of any one of claims 1-92, wherein the first ligand binding domain comprises a variable heavy chain (VH) domain and a variable light chain (VL) domain.

96. The allogeneic immune cell of claim 93, wherein the first ligand is EGFR or a peptide antigen thereof, and the first ligand binding domain comprises a sequence of SEQ ID NO: 99, SEQ ID NO: 101, SEQ ID NO: 103, SEQ ID NO: 105, SEQ ID NO: 107, SEQ ID NO: 109, SEQ ID NO: 111, SEQ ID NO: 113, SEQ ID NO: 115 or SEQ ID NO: 381, or a sequence having at least 90%, at least 95% or at least 99% identity thereto.

97. The allogeneic immune cell of claim 93, wherein the first ligand is MSLN or a peptide antigen thereof, and the first ligand binding domain comprises a sequence of SEQ ID NO: 83, SEQ ID NO: 85, SEQ ID NO: 87 or SEQ ID NO: 89, or a sequence having at least 90%, at least 95% or at least 99% identity thereto.

98. The allogeneic immune cell of claim 93, wherein the first ligand is CEA or a peptide antigen thereof, and the first ligand binding domain comprises SEQ ID NO: 91, SEQ ID NO: 93, SEQ ID NO: 95, SEQ ID NO: 97, SEQ ID NO: 273, SEQ ID NO: 275, or SEQ ID NO: 277, or a sequence having at least 90%, at least 95% or at least 99% identity thereto.

99. The allogeneic immune cell of claim 93, wherein the first ligand is CD19 or a peptide antigen thereof, and the first ligand binding domain comprises SEQ ID NO: 266 or SEQ ID NO: 268, or a sequence having at least 90%, at least 95% or at least 99% identity thereto.

100. The allogeneic immune cell of claim 93, wherein the first ligand comprises a pan-HLA ligand, and the first ligand binding domain comprises a sequence of SEQ ID NO: 163, SEQ ID NO: 165, SEQ ID NO: 167, SEQ ID NO: 169, SEQ ID NO: 171, or SEQ ID NO: 173, or a sequence having at least 90%, at least 95% or at least 99% identity thereto.

101. The allogeneic immune cell of claim 93, wherein the first ligand comprises EGFR or a peptide antigen thereof, and the first ligand binding domain comprises CDRs selected from SEQ ID NOs: 129-162.

102. The allogeneic immune cell of claim 93, wherein the first ligand comprises a CEA ligand, or a peptide antigen thereof, and the first ligand binding domain comprises CDRs selected from SEQ ID NOs: 285-293.

103. The allogeneic immune cell of any one of claims 1-102, wherein the second ligand binding domain comprises an ScFv, a Vβ domain, or a TCR α chain variable domain and a TCR β chain variable domain.

104. The allogeneic immune cell of any one of claims 1-102, wherein the second ligand binding domain comprises a variable heavy chain (VH) domain and a variable light chain (VL) domain.

105. The allogeneic immune cell of claim 103, wherein the second ligand comprises an HLA-A*02 allele, and wherein the second ligand binding domain comprises any one of SEQ ID NOs: 50-61 or a sequence having at least 90%, at least 95%, or at least 99% identity thereto.

106. The allogeneic immune cell of claim 103, wherein the second ligand comprises an HLA-A*02 allele, and the second ligand binding domain comprises CDRs selected from SEQ ID NOs: 39-49.

107. The allogeneic immune cell of any one of claim 1-106, wherein the second engineered receptor comprises at least one immunoreceptor tyrosine-based inhibitory motif (ITIM).

108. The allogeneic immune cell of any one of claims 1-107, wherein the second engineered receptor comprises a LILRB1 intracellular domain or a functional variant thereof.

109. The allogeneic immune cell of claim 108, wherein the LILRB1 intracellular domain comprises a sequence at least 95% identical to SEQ ID NO: 73.

110. The allogeneic immune cell of any one of claims 1-109, wherein the second engineered receptor comprises a LILRB1 transmembrane domain or a functional variant thereof.

111. The allogeneic immune cell of claim 110, wherein the LILRB1 transmembrane domain or a functional variant thereof comprises a sequence at least 95% identical to SEQ ID NO: 82.

112. The allogeneic immune cell of any one of claims 1-111, wherein the second engineered receptor comprises a LILRB1 hinge domain or functional fragment or variant thereof.

113. The allogeneic immune cell of claim 112, wherein the LILRB1 hinge domain comprises a sequence at least 95% identical to SEQ ID NO: 81, SEQ ID NO: 74 or SEQ ID NO: 75.

114. The allogeneic immune cell of any one of claims 1-113, wherein the second engineered receptor comprises a LILRB1 intracellular domain and a LILRB1 transmembrane domain, or a functional variant thereof.

115. The allogeneic immune cell of claim 114, wherein the LILRB1 intracellular domain and LILRB1 transmembrane domain comprises SEQ ID NO: 77 or a sequence at least 95% identical to SEQ ID NO: 77.

116. The allogeneic immune cell of any one of claims 105-115, wherein the second inhibitory receptor comprises a sequence of SEQ ID NO: 21902 or a sequence having at least 90%, at least 95% or at least 99% identity thereto.

117. The allogeneic immune cell of any one of claims 1-116, wherein the immune cell is selected form the group consisting of T cells, B cells and Natural Killer (NK) cells.

118. The allogeneic immune cell of any one of the preceding claims, wherein the immune cell is non-natural.

119. The allogeneic immune cells of any one of the preceding claims, wherein the immune cell is isolated.

120. The allogeneic immune cell of any one of the preceding claims, for use as a medicament.

121. The allogeneic immune cell of claim 120, wherein the medicament is for the treatment of cancer in a subject.

122. A pharmaceutical composition, comprising a plurality of the allogeneic immune cells of any one of claims 1-121.

123. The pharmaceutical composition of claim 122, comprising a pharmaceutically acceptable carrier, diluent or excipient.

124. The pharmaceutical composition of claim 122 or 123, comprising a therapeutically effective amount of the allogeneic immune cells.

125. A method of increasing the specificity of an adoptive cell therapy in a subject, comprising administering to the subject a plurality of the allogeneic immune cell of any one of claims 1-121 or the pharmaceutical composition of any one of claims 122-124.

126. A method of treating a subject with cancer with an adoptive cell therapy, comprising administering to the subject a plurality of the allogeneic immune cells of any one of claims 1-121 or the pharmaceutical composition of any one of claims 122-124.

127. The method of claim 126, wherein cells of the cancer express the first ligand.

128. The method of any one of claim 126 or 127, wherein cells of the cancer do not express the second ligand due to loss of heterozygosity.

129. The method of any one of claims 126-128, wherein non-target cells express both the first ligand and the second ligand.

130. The method of any one of claims 126-129, wherein immune cells of the subject express the second ligand.

131. The method of any one of claims 125-130, comprising administering a lymphodepletion agent to the subject.

132. The method of claim 131, wherein the lymphodepletion agent specifically targets CD52.

133. A method of making the allogeneic immune cell of any one of claims 1-121, comprising
a. providing a plurality of allogeneic immune cells; and
b. contacting the immune cells with a vector comprising sequences encoding:
i. a first engineered receptor comprising a transmembrane region and an extracellular region, the extracellular region comprising a first ligand binding domain capable of specifically binding a first ligand, and
ii. a second engineered receptor comprising a transmembrane region and an extracellular region, the extracellular region comprising a second ligand binding domain capable of specifically binding a second ligand;
wherein binding of the first ligand binding domain to the first ligand activates or promotes activation of the immune cell, and
wherein binding of the second ligand binding domain to a second ligand inhibits activation of the immune cell by the first ligand.

134. The method of claim 133, wherein the sequences of the first and second engineered receptors are operably linked to a first promoter.

135. The method of claim 133 or 134, wherein the vector further comprises a sequence encoding a self-cleaving peptide between the sequence encoding the first engineered receptor and the sequence encoding the second engineered receptor.

136. The method of any one of claims 133-135, wherein the vector further comprises a sequence encoding a B2M or HLA-A shRNA operably linked to a sequence promoter.

137. The method of any one of claims 133-136, wherein the vector further comprises a sequence encoding a guide nucleic acid (gNA) comprising a targeting sequence specific to a B2M or HLA-A*02 target sequence, wherein the sequence encoding the gNA is operably linked to a second promoter.

138. The method of claim 137, wherein the vector is a lentiviral vector, and contacting the immune cells with the vector comprises transducing the immune cells.

139. The method of claim 138, further comprising transfecting the immune cells with a Cas9 protein or a nucleic acid comprising a sequence encoding a Cas9 protein.

140. A kit comprising the allogeneic immune cell of any one of claims 1-121 or the pharmaceutical composition of any one of claims 122-124.

141. The kit of claim 140, further comprising instructions for use.

142. A vector comprising:
a. a sequence encoding a first engineered receptor, the first engineered receptor comprising a transmembrane region and an extracellular region, the extracellular region comprising a first ligand binding domain capable of specifically binding a first ligand;
b. a self-cleaving polypeptide sequence; and
c. a sequence encoding second engineered receptor, the second engineered receptor comprising a transmembrane region and an extracellular region, the extracellular region comprising a second ligand binding domain capable of specifically binding a second ligand,
wherein binding of the first ligand binding domain to the first ligand activates or promotes activation of the immune cell by the first receptor, and
wherein binding of the second ligand binding domain to the second ligand inhibits activation of the immune cell by the first receptor.

143. A vector comprising
a. a first promoter operably linked to:
i. a sequence encoding a first engineered receptor, the first engineered receptor comprising a transmembrane region and an extracellular region, the extracellular region comprising a first ligand binding domain capable of specifically binding a first ligand,
ii. a self-cleaving polypeptide sequence, and
iii. a sequence encoding second engineered receptor, the second engineered receptor comprising a transmembrane region and an extracellular region, the extracellular region comprising a second ligand binding domain capable of specifically binding a second ligand; and
b. a second promoter operably linked to a sequence encoding a guide nucleic acid or an short interfering RNA (shRNA) capable of reducing expression of HLA-A or B2M by an immune cell;
wherein binding of the first ligand binding domain to the first ligand activates or promotes activation of the immune cell by the first receptor,
wherein binding of the second ligand binding domain to the second ligand inhibits activation of the immune cell by the first receptor.
